(19) United States
(12) Patent Application Publication
(10) Pub. No.: US 2020/0392195 A1
(43) Pub. Date: Dec. 17, 2020

(54) GLUCAGON-LIKE PEPTIDE-2 COMPOSITIONS AND METHODS OF MAKING AND USING SAME

(71) Applicant: AMUNIX PHARMACEUTICALS, INC., Mountain View, CA (US)

(72) Inventors: Volker Schellenberger, Palo Alto, CA (US); Joshua Silverman, Sunnyvale, CA (US); Willem P. Stemmer, Los Gatos, CA (US); Chia-wei Wang, Milpitas, CA (US); Nathan Geething, Santa Clara, CA (US); Benjamin Spink, San Carlos, CA (US)

(21) Appl. No.: 16/777,125

(22) Filed: Jan. 30, 2020

Related U.S. Application Data
(63) Continuation of application No. 14/343,111, filed on Feb. 1, 2016, now abandoned.
(60) Provisional application No. 61/573,748, filed on Sep. 12, 2011.

(51) Int. Cl. C07K 14/605

(52) U.S. Cl. CPC C07K 14/605; A61K 38/00; C07K 2319/31

(57) ABSTRACT

The present invention relates to compositions comprising GLP-2 protein or variants thereof linked to extended recombinant polypeptide (XTEN), isolated nucleic acides encoding the compositions and vectors and host cells containing the same, and methods of making and using such compositions in the treatment of GLP-2 related conditions.

### CROSS-REFERENCE TO RELATED APPLICATION

[0001] This application is a continuation application of U.S. application Ser. No. 14/343,111, filed Feb. 1, 2016, entitled “Glucagon-Like Peptide-2 Compositions and Methods of Making and Using Same,” which is a national phase application under 35 U.S.C. § 371 of PCT Application No. PCT/US2012/054941, filed Sep. 12, 2012, entitled “Glucagon-Like Peptide-2 Compositions and Methods of Making and Using Same,” which claims priority benefit to U.S. Provisional Application Ser. No. 61/573,748 filed Sep. 12, 2011, and which applications are incorporated herein by reference in their entirety.

### SEQUENCE LISTING

[0002] The instant application contains a Sequence Listing which has been submitted in ASCII format via EFS-Web and is hereby incorporated by reference in its entirety. Said ASCII copy, created on Oct. 26, 2012, is named 732.601SequenceListing.txt and is 1,466,444 bytes in size.

### BACKGROUND OF THE INVENTION

[0003] Glucagon-like peptide-2 (GLP-2) is an endocrine peptide that, in humans, is generated as a 33 amino acid peptide by post-translational proteolytic cleavage of proglucagon; a process that also liberates the related glucagon-like peptide-1 (GLP-1). GLP-2 is produced and secreted in a nutrient-dependent fashion by the intestinal endocrine L cells. GLP-2 is trophic to the intestinal mucosal epithelium via stimulation of crypt cell proliferation and reduction of enterocyte apoptosis. GLP-2 exerts its effects through specific GLP-2 receptors but the responses in the intestine are mediated by indirect pathways in that the receptor is not expressed on the epithelium but on enteric neurons (Redstone, H A, et al. The Effect of Glucagon-Like Peptide-2 Receptor Agonists on Colonic Anastomotic Wound Healing. Gastroenterol Res Pract. (2010); 2010: Art. ID: 672453).

[0004] The effects of GLP-2 are multiple, including intestinaltrophic effects resulting in an increase in intestinal absorption and nutrient assimilation (Lovshin, J. and D. J. Drucker, Synthesis, secretion and biological actions of the glucagon-like peptides. Ped. Diabetes (2000) 1(1):49-57); anti-inflammatory activities; mucosal healing and repair; decreasing intestinal permeability; and an increase in mesenteric blood flow (Bremholm, L. et al. Glucagon-like peptide-2 increases mesenteric blood flow in humans. Scan. J. Gastro. (2009) 44(3):314-319). Exogenously administered GLP-2 produces a number of effects in humans and rodents, including slowing gastric emptying, increasing intestinal blood flow and intestinal growth/mucosal surface area, enhancement of intestinal function, reduction in bone breakdown and neuroprotection. GLP-2 may act in an endocrine fashion to link intestinal growth and metabolism with nutrient intake. In inflamed mucosa, however, GLP-2 action is antiproliferative, decreasing the expression of proinflammatory cytokines while increasing the expression of IGF-1, promoting healing of inflamed mucosa.

[0005] Many patients require surgical removal of the small or large bowel for a wide range of conditions, including colorectal cancer, inflammatory bowel disease, irritable bowel syndrome, and trauma. Short bowel syndrome (SBS) patients with end jejunostomy and no colon have reduced release of GLP-2 in response to a meal due to the removal of secreting L cells. Patients with active Crohn's Disease or ulcerative colitis have endogenous serum GLP-2 concentrations that are increased, suggesting the possibility of a normal adaptive response to mucosal injury (Buchman, A. L., et al. Teduglutide, a novel mucosally active analog of glucagon-like peptide-2 (GLP-2) for the treatment of moderate to severe Crohn's disease. Inflammatory Bowel Diseases, (2010) 16:962-973).

[0006] Exogenously administered GLP-2 and GLP-2 analogues have been demonstrated in animal models to promote the growth and repair of the intestinal epithelium, including enhanced nutrient absorption following small bowel resection and alleviation of total parenteral nutrition-induced hypoplasia in rodents, as well as demonstration of decreased mortality and improvement of disease-related histopathology in animal models such as indomethacin-induced enteritis, dextran sulfate-induced colitis and chemotherapy-induced mucositis. Accordingly, GLP-2 and related analogs may be treatments for short bowel syndrome, irritable bowel syndrome, Crohn's disease, and other diseases of the intestines (Moor, B A, et al. GLP-2 receptor agonism ameliorates inflammation and gastrointestinal stasis in murine post-operative ileus. J Pharmacol Exp Ther. (2010) 333(2):574-583). However, native GLP-2 has a half-life of approximately seven minutes due to cleavage by dipeptidyl peptidase IV (DPP-IV) (Jeppesen P B, et al., Teduglutide (ALX-0600), a dipeptidyl peptidase IV resistant glucagon-like peptide 2 analogue, improves intestinal function in short bowel syndrome patients. Gut. (2005) 54(9):1224-1231; Hartmann B, et al. (2000) Dipeptidyl peptidase IV inhibition enhances the intestinotrophic effect of glucagon-like peptide-2 in rats and mice. Endocrinology 141:4013-4020). It has been determined that modification of the GLP-2 sequence by replacement of alanine with glycine in position 2 blocks degradation by DPP-IV, extending the half life of the analog called teduglutide to 0.9-2.3 hours (Marier J F, Population pharmacokinetics of teduglutide following repeated subcutaneous administrations in healthy participants and in patients with short bowel syndrome and Crohn's disease. J Clin Pharmacol. (2010) 50(1):36-49). However, recent clinical trials utilizing teduglutide in patients with short bowel syndrome required daily administration of the GLP-2 analog to achieve a clinical benefit (Jeppesen P B, Randomized placebo-controlled trial of teduglutide in reducing parenteral nutrition and/or intravenous fluid requirements in patients with short bowel syndrome. Gut (2011) 60(7):902-914).

[0007] Chemical modifications to a therapeutic protein can modify its in vivo clearance rate and subsequent half-life. One example of a common modification is the addition of a polyethylene glycol (PEG) moiety, typically coupled to the protein via an aldehyde or N-hydroxysuccinimide (NHS) group on the PEG reacting with an amine group (e.g. lysine side chain or the N-terminus). However, the conjugation step can result in the formation of heterogeneous product mixtures that need to be separated, leading to significant product loss and complexity of manufacturing and does not result in a completely chemically-uniform product. Also, the pharmacologic function of pharmacologically-active proteins may be hampered if amino acid side chains in the vicinity of its binding site become modified by the PEGylation process. Other approaches include the genetic fusion of an Fc domain to the therapeutic protein, which increases the size of the therapeutic protein, hence reducing the rate of clearance through the kidney. Additionally, the Fc domain confers the ability to bind to, and be recycled from lysosomes by, the FcRn receptor, which results in increased pharmacokinetic half-life. A form of GLP-2 fused to Fc has been evaluated in a murine model of gastrointestinal inflammation associated with postoperative ileus (Moor, B A, et al. GLP-2 receptor agonism ameliorates inflammation and gastrointestinal stasis in murine post-operative ileus. J Pharmacol Exp Ther. (2010) 333(2):574-583). Unfortunately, the Fc domain does not fold efficiently during recombinant expression, and tends to form insoluble precipitates known as inclusion bodies. These inclusion bodies must be solubilized and functional protein must be renatured from the misfolded aggregate, a time-consuming, inefficient, and expensive process.

### SUMMARY OF THE INVENTION

[0008] Accordingly, there remains a considerable need for GL-2 compositions and formulations with increased half-life and retention of activity and bioavailability when administered as part of a preventive and/or therapeutic regimen for GLP-2 associated conditions and diseases that can be administered less frequently, and are safer and less complicated and costly to produce. The present invention addresses this need and provides related advantages as well. The present invention relates to novel GLP-2 compositions and uses thereof. Specifically, the compositions provided herein are particularly used for the treatment or improvement of a gastrointestinal a condition. In one aspect, the present invention provides compositions of fusion proteins comprising a recombinant glucagon-like protein-2 (“GLP-2”) and one or more extended recombinant polypeptides (“XTEN”). A subject XTEN is typically a polypeptide with a non-repetitive sequence and unstructured conformation that is useful as a fusion partner to GLP-2 peptides in that it confers enhanced properties to the resulting fusion protein. In one embodiment, one or more XTEN is linked to a GLP-2 or sequence variants thereof, resulting in a GLP-2-XTEN fusion protein (“GLP2-XTEN”). The present disclosure also provides pharmaceutical compositions comprising the fusion proteins and the uses thereof for treating GLP-2-related conditions. In one aspect, the GLP2-XTEN compositions have enhanced pharmacokinetic and/or physicochemical properties compared to recombinant GLP-2 not linked to the XTEN, which permit more convenient dosing and result in improvement in one or more parameters associated with the gastrointestinal condition. The GLP2-XTEN fusion proteins of the embodiments disclosed herein exhibit one or more or any combination of the improved properties and/or the embodiments as detailed herein. In some embodiments, the GLP2-XTEN compositions of the invention do not have a component selected the group consisting of: polyethylene glycol (PEG), albumin, antibody, and an antibody fragment.

[0009] In one embodiment, the invention provides a recombinant GLP-2 fusion protein comprising an XTEN, wherein the XTEN is characterized in that a) the XTEN comprises at least 36, or at least 72, or at least 96, or at least 120, or at least 144, or at least 288, or at least 576, or at least 864, or at least 1000, or at least 2000, or at least 3000 amino acid residues; b) the sum of glycine (G), alanine (A), serine (S), threonine (T), glutamate (E) and proline (P) residues constitutes at least about 80%, or at least about 90%, or at least about 95%, or at least about 96%, or at least about 97%, or at least about 98%, or at least about 99%, of the total amino acid residues of the XTEN; c) the XTEN is substantially non-repetitive such that (i) the XTEN contains no three contiguous amino acids that are identical unless the amino acids are serine; (ii) at least about 80%, or at least about 90%, or at least about 91%, or at least about 92%, or at least about 93%, or at least about 94%, or at least about 95%, or at least about 96%, or at least about 97%, or at least about 98%, or at least about 99%, of the XTEN sequence consists of non-overlapping sequence motifs, each of the sequence motifs comprising about 9 to about 14, or about 12 amino acid residues consisting of three, four, five or six types of amino acids selected from glycine (G), alanine (A), serine (S), threonine (T), glutamate (E) and proline (P), wherein any two contiguous amino acid residues do not occur more than twice in each of the non-overlapping sequence motifs; or (iii) the XTEN sequence has a subsequence score of less than 10; d) the XTEN has greater than 90%, or greater than 95%, or greater than 99%, random coil formation as determined by GOR algorithm; e) the XTEN has less than 2% alpha helices and 2% beta-sheets as determined by Chou-Fasman algorithm; f) the XTEN lacks a predicted T-cell epitope when analyzed by TEPITOPE algorithm, wherein the TEPITOPE threshold score for said prediction by said algorithm has a threshold of −9; wherein said fusion protein exhibits an apparent molecular weight factor of at least about 4, or at least about 5, or at least about 6, or at least about 7, or at least about 8, or at least about 9, or at least about 10, or at least about 11, or at least about 12, or at least about 15, or at least about 20 when measured by size exclusion chromatography or comparable method and exhibits an intestinotrophic effect when administered to a subject using a therapeutically effective amount. In the foregoing embodiment, the XTEN can have any one of elements (a)-(d) or any combination of (a)-(d). In another embodiment of the foregoing, the fusion protein exhibits an apparent molecular weight of at least about 200 kDa, or at least about 400 kDa, or at least about 500 kDa, or at least about 700 kDa, or at least about 1000 kDa, or at least about 1400 kDa, or at least about 1600 kDa, or at least about 1800 kDa, or at least about 2000 kDa, or at least about 3000 kDa. In another embodiment of the foregoing, the fusion protein exhibits a terminal half-life that is longer than about 24, or about 30, or about 48, or about 72, or about 96, or about 120, or about 144 hours when administered to a subject, wherein the subject is selected from mouse, rat, monkey and man. In one embodiment, the XTEN of the fusion protein is characterized in that at least about 80%, or at least about 90%, or at least about 91%, or at least about 92%, or at least about 93%, or at least about 94%, or at least about 95%, or at least about 96%, or at least about 97%, or at least about 98%, or at least about 99% of the XTEN sequence consists of non-overlapping sequence motifs wherein the motifs are selected from Table 3. In some embodiments, the XTEN of the fusion proteins are further characterized in that the sum of asparagine and glutamine residues is less than 10%, or less than 5%, or less than 2% of the total amino acid sequence of the XTEN. In other embodiments, the XTEN of the fusion proteins are further characterized in that the sum of methionine and tryptophan residues is less than 2% of the total amino acid sequence of the XTEN. In still other embodiments, the XTEN of the fusion proteins are further characterized in that the XTEN has less than 5% amino acid residues with a positive charge. In one embodiment, the intestinotrophic effect of the administered fusion protein is at least about 30%, or at least about 40%, or at least about 50%, or at least about 60%, or at least about 70%, or at least about 80%, or at least about 90%, or at least about 100% or at least about 120% or at least about 150% or at least about 200% of the intestinotrophic effect compared to the corresponding GLP-2 not linked to XTEN and administered to a subject using a comparable dose. In one embodiment, the intestinotrophic effect is manifest in a subject selected from the group consisting of mouse, rat, monkey, and human. In the foregoing embodiments, said administration is subcutaneous, intramuscular, or intravenous. In another embodiment, the intestinotrophic effect is determined after administration of 1 dose, or 3 doses, or 6 doses, or 10 doses, or 12 or more doses of the fusion protein. In another embodiment, the intestinotrophic effect is selected from the group consisting of intestinal growth, increased hyperplasia of the villus epithelium, increased crypt cell proliferation, increased height of the crypt and villus axis, increased healing after intestinal anastomosis, increased small bowel weight, increased small bowel length, decreased small bowel epithelium apoptosis, reduced ulceration, reduced intestinal adhesions, and enhancement of intestinal function.

[0010] In one embodiment, the administration of the GLP2-XTEN fusion protein results in an increase in small intestine weight of at least about 10%, or at least about 20%, or at least about 30%. In another embodiment, the administration results in an increase in small intestine length of at least about 5%, or at least about 6%, or at least about 7%, or at least about 8%, or at least about 9%, or at least about 10%, or at least about 20%, or at least about 30%.

[0011] In one embodiment, the GLP-2 sequence of the fusion protein has at least 90%, or at least about 91%, or at least about 92%, or at least about 93%, or at least about 94%, or at least about 95%, or at least about 96%, or at least about 97%, or at least about 98%, or at least about 99%, or about 100% sequence identity to a sequence selected from the group consisting of the sequences in Table 1, when optimally aligned. In another embodiment, the GLP-2 of the fusion protein comprises human GLP-2. In another embodiment, the GLP-2 of the fusion protein comprises a GLP-2 of a species origin other than human, such as bovine GLP-2, pig GLP-2, sheep GLP-2, chicken GLP-2, and canine GLP-2. In some embodiments, the GLP-2 of the fusion proteins has an amino acid substitution in place of Ala², wherein the substitution is glycine. In yet another embodiment, the GLP-2 of the fusion protein has the sequence HGDGSFSDEMNTILDNLAARDFINWLIQTKITD (SEQ ID NO: 1).

[0012] In one embodiment of the GLP2-XTEN fusion protein, the XTEN is linked to the C-terminus of the GLP-2. In another embodiment of the GLP2-XTEN fusion protein wherein the XTEN is linked to the C-terminus of the GLP-2, the fusion protein further comprises a spacer sequence of 1 to about 50 amino acid residues linking the GLP-2 and XTEN components. In one embodiment, the spacer sequence is a single glycine residue.

[0013] In one embodiment of the GLP2-XTEN fusion protein, the XTEN is characterized in that: (a) the total XTEN amino acid residues is at least 36 to about 3000, or about 144 to about 2000, or about 288 to about 1000 amino acid residues; and (b) the sum of glycine (G), alanine (A), serine (S), threonine (T), glutamate (E) and proline (P) residues constitutes at least about 90%, or at least about 95%, or at least about 96%, or at least about 97%, or at least about 98%, or at least about 99%, of the total amino acid residues of the XTEN.

[0014] In one embodiment of the GLP2-XTEN fusion protein, the fusion protein comprises one or more XTEN having at least 80%, or at least about 90%, or at least about 95%, or at least about 96%, or at least about 97%, or at least about 98%, or at least about 99% or sequence identity compared to a sequence of comparable length selected from any one of Table 4, Table 8, Table 9, Table 10, Table 11, and Table 12, when optimally aligned. In another embodiment, the fusion protein comprises an XTEN wherein the sequence is AE864 of Table 4. In another embodiment, the fusion protein sequence has a sequence with at least 90%, or at least about 91%, or at least about 92%, or at least about 93%, or at least about 94%, or at least about 95%, or at least about 96%, or at least about 97%, or at least about 98%, or at least about 99%, or 100% sequence identity to the sequence set forth in FIG. 28.

[0015] In one embodiment, the fusion protein comprising a GLP-2 and XTEN binds to a GLP-2 receptor with an EC₅₀ of less than about 30 nM, or about 100 nM, or about 200 nM, or about 300 nM, or about 370 nM, or about 400 nM, or about 500 nM, or about 600 nM, or about 700 nM, or about 800 nM, or about 1000 nM, or about 1200 nM, or about 1400 nM when assayed using an in vitro GLP2R cell assay. In another embodiment, the fusion protein retains at least about 1%, or about 2%, or about 3%, or about 4%, or about 5%, or about 10%, or about 20%, or about 30% of the potency of the corresponding GLP-2 not linked to XTEN when assayed using an in vitro GLP2R cell assay. In the foregoing embodiments of the paragraph, the GLP2R cell can be a human recombinant GLP-2 glucagon family receptor calcium-optimized cell or another cell comprising GLP2R known in the art.

[0016] Non-limiting examples of fusion proteins with a single GLP-2 linked to one or two XTEN are presented in Tables 13 and 32. In one embodiment, the invention provides a fusion protein composition has at least about 80% sequence identity compared to a sequence from Table 13 or Table 33, alternatively at least about 81%, 82%, 83%, 84%, 85%, 86%, 87%, 88%, 89%, 90%, 91%, 92%, 93%, 94%, 95%, 96%, 97%, 98%, 99%, or about 100% sequence identity as compared to a sequence from Table 13 or Table 33. However, the invention also provides substitution of any of the GLP-2 sequences of Table 1 for a GLP-2 in a sequence of Table 33, and substitution of any XTEN sequence of Table 4 for an XTEN in a sequence of Table 33. In some embodiments, the GLP-2 and the XTEN further comprise a spacer sequence of 1 to about 50 amino acid residues linking the GLP-2 and XTEN components, wherein the spacer sequence optionally comprises a cleavage sequence that is cleavable by a protease, including endogenous mammalian proteases. Examples of such protease include, but are not limited to, FXIa, FXIIa, kallikrein, FVIIIa, FVIIIa, FXa, thrombin, elastase-2, granzyme B, MMP-12, MMP-13, MMP-17 or MMP-20, TEV, enterokinase, rhinovirus 3C protease, and sortase A, or a sequence selected from Table 6. In one embodiment, a fusion protein composition with a cleavage sequence has a sequence having at least about 80% sequence identity compared to a sequence from Table 34, alternatively at least about 81%, 82%, 83%, 84%, 85%, 86%, 87%, 88%, 89%, 90%, 91%, 92%, 93%, 94%, 95%, 96%, 97%, 98%, 99%, or about 100% sequence identity as compared to a sequence from Table 34. However, the invention also provides substitution of any of the GLP-2 sequences of Table 1 for a GLP-2 in a sequence of Table 34, and substitution of any XTEN sequence of Table 4 for an XTEN in a sequence of Table 34, and substitution of any cleavage sequence of Table 6 for a cleavage sequence in a sequence of Table 34. In embodiments having the subject cleavage sequences linked to the XTEN, cleavage of the cleavage sequence by the protease releases the XTEN from the fusion protein. In some embodiments of the fusion proteins comprising cleavage sequences that link XTEN to GLP-2, the GLP-2 component becomes biologically active or has an increase in the capacity to bind to GLP-2 receptor upon its release from the XTEN by cleavage of the cleavage sequence, wherein the resulting activity of the cleaved protein is at least about 30%, or at least about 40%, or at least about 50%, or at least about 60%, or at least about 70%, or at least about 80%, or at least about 90% compared to the corresponding GLP-2 not linked to XTEN. In one embodiment of the foregoing, the cleavage sequence is cleavable by a protease of Table 6. In another embodiment, the fusion protein comprises XTEN linked to the GLP-2 by two heterologous cleavage sequences that are cleavable by different proteases, which can be sequences of Table 6. In one embodiment of the foregoing, the cleaved GLP2-XTEN has increased capacity to bind the GLP-2 receptor.

[0017] The invention provides that the fusion proteins compositions of the embodiments comprising GLP-2 and XTEN characterized as described above, can be in different N- to C-terminus configurations. In one embodiment of the GLP2-XTEN composition, the invention provides a fusion protein of formula I:

(GLP-2)-(XTEN) I

wherein independently for each occurrence, GLP-2 is a GLP-2 protein or analog as defined herein, including sequences of Table 1, and XTEN is an extended recombinant polypeptide as defined herein, including sequences exhibiting at least about 80%, or at least about 90%, or at least about 95%, or at least about 99% sequence identity to a sequence of comparable length from any one of of Table 4, Table 8, Table 9, Table 10, Table 11, and Table 12, when optimally aligned. In one embodiment, the XTEN is AE864.

[0018] In another embodiment of the GLP2-XTEN composition, the invention provides a fusion protein of formula II:

(XTEN)-(GLP-2) II

wherein independently for each occurrence, GLP-2 is a GLP-2 protein or analog as defined herein, including sequences of Table 1, and XTEN is an extended recombinant polypeptide as defined herein, including sequences exhibiting at least about 80%, or at least about 90%, or at least about 95%, or at least about 99% sequence identity to a sequence of comparable length from any one of of Table 4, Table 8, Table 9, Table 10, Table 11, and Table 12, when optimally aligned. In one embodiment, the XTEN is AE864.

[0019] In another embodiment of the GLP2-XTEN composition, the invention provides an isolated fusion protein, wherein the fusion protein is of formula III:

(XTEN)-(GLP-2)-(XTEN) III

wherein independently for each occurrence, GLP-2 is a GLP-2 protein or analog as defined herein (e.g., including sequences of Table 1), and XTEN is an extended recombinant polypeptide as defined herein, including sequences exhibiting at least about 80%, or at least about 90%, or at least about 95%, or at least about 99% sequence identity to a sequence of comparable length from any one of of Table 4, Table 8, Table 9, Table 10, Table 11, and Table 12, when optimally aligned. In one embodiment, the XTEN is AE864.

[0020] In another embodiment of the GLP2-XTEN composition, the invention provides an isolated fusion protein, wherein the fusion protein is of formula IV:

(GLP-2)-(XTEN)-(GLP-2) IV

wherein independently for each occurrence, GLP-2 is a GLP-2 protein or analog as defined herein (e.g., including sequences of Table 1), and XTEN is an extended recombinant polypeptide as defined herein e.g., including sequences exhibiting at least about 80%, or at least about 90%, or at least about 95%, or at least about 99% sequence identity to a sequence of comparable length from any one of of Table 4, Table 8, Table 9, Table 10, Table 11, and Table 12, when optimally aligned. In one embodiment, the XTEN is AE864.

[0021] In another embodiment of the GLP2-XTEN composition, the invention provides an isolated fusion protein, wherein the fusion protein is of formula V:

(GLP-2)-(S)ₓ-(XTEN)_{y} V

wherein independently for each occurrence, GLP-2 is a GLP-2 protein or analog as defined herein, including sequences of Table 1; S is a spacer sequence having between 1 to about 50 amino acid residues that can optionally include a cleavage sequence or amino acids compatible with restrictions sites; x is either 0 or 1; and XTEN is an extended recombinant polypeptide as defined herein, including sequences exhibiting at least about 80%, or at least about 90%, or at least about 95%, or at least about 99% sequence identity to a sequence of comparable length from any one of Table 4, Table 8, Table 9, Table 10, Table 11, and Table 12, when optimally aligned. In one embodiment, the XTEN is AE864. In the embodiments of formula V, the spacer sequence comprising a cleavage sequence is a sequence that is cleavable by a mammalian protease selected from the group consisting of factor XIa, factor XIIa, kallikrein, factor VIIa, factor IXa, factor Xa, factor IIa (thrombin), elastase-2, MMP-12, MMP13, MMP-17 and MMP-20. In one embodiment of the fusion protein of formula V, the GLP-2 comprises human GLP-2. In another embodiment of the fusion protein of formula V, the GLP-2 comprises a GLP-2 of a species origin other than human, e.g., bovine GLP-2, pig GLP-2, sheep GLP-2, chicken GLP-2, and canine GLP-2. In another embodiment of the fusion protein of formula V, the GLP-2 has an amino acid substitution in place of Ala₂, and wherein the substitution is glycine. In another embodiment, of the fusion protein of formula V, the GLP-2 has the sequence HGDGSFSDEMNTILDNLAARDFINWLIQTKITD (SEQ ID NO: 1). In another embodiment of the fusion protein of formula V, the fusion protein comprises a spacer sequence wherein the spacer sequence is a glycine residue.

[0022] In another embodiment of the GLP2-XTEN composition, the invention provides an isolated fusion protein, wherein the fusion protein is of formula VI:

(XTEN)ₓ-(S)ₓ-(GLP-2)-(S)_{y}-(XTEN)_{y} VI

wherein independently for each occurrence, GLP-2 is a GLP-2 protein or analog as defined herein (e.g., including sequences of Table 1); S is a spacer sequence having between 1 to about 50 amino acid residues that can optionally include a cleavage sequence or amino acids compatible with restrictions sites; x is either 0 or 1 and y is either 0 or 1 wherein x+y≥1; and XTEN is an extended recombinant polypeptide as defined herein, e.g., including exhibiting at least about 80%, or at least about 90%, or at least about 95%, or at least about 99% sequence identity to a sequence of comparable length from any one of of Table 4, Table 8, Table 9, Table 10, Table 11, and Table 12, when optimally aligned. In one embodiment, the XTEN is AE864. In the embodiments of formula VI, the spacer sequence comprising a cleavage sequence is a sequence that is cleavable by a mammalian protease, including but not limited to factor XIa, factor XIIa, kallikrein, factor VIIa, factor IXa, factor Xa, factor IIa (thrombin), elastase-2, MMP-12, MMP13, MMP-17 and MMP-20.

[0023] In some embodiments, administration of a therapeutically effective dose of a fusion protein of one of formulae I-VI to a subject in need thereof can result in a gain in time of at least two-fold, or at least three-fold, or at least four-fold, or at least five-fold, or at least 10-fold or more spent within a therapeutic window for the fusion protein compared to the corresponding GLP-2 not linked to the XTEN and administered at a comparable dose to a subject. In other cases, administration of a therapeutically effective dose of a fusion protein of an embodiment of formulae I-VI to a subject in need thereof can result in a gain in time between consecutive doses necessary to maintain a therapeutically effective dose regimen of at least 48 h, or at least 72 h, or at least about 96 h, or at least about 120 h, or at least about 7 days, or at least about 14 days, or at least about 21 days between consecutive doses compared to administration of a corresponding GLP-2 not linked to XTEN at a comparable dose.

[0024] The fusion protein compositions of the embodiments described herein can be evaluated for retention of activity (including after cleavage of any incorporated XTEN-releasing cleavage sites) using any appropriate in vitro assay disclosed herein (e.g., the assays of Table 32 or the assays described in the Examples), to determine the suitability of the configuration for use as a therapeutic agent in the treatment of a GLP-2-factor related condition. In one embodiment, the fusion protein exhibits at least about 2%, or at least about 5%, or at least about 10%, or at least about 20%, or at least about 30%, or at least about 40%, or at least about 50%, or at least about 60%, or at least about 70%, or at least about 80%, or at least about 90% of the activity compared to the corresponding GLP-2 not linked to XTEN. In another embodiment, the GLP-2 component released from the fusion protein by enzymatic cleavage of the incorporated cleavage sequence linking the GLP-2 and XTEN components exhibits at least about 50%, or at least about 60%, or at least about 70%, or at least about 80%, or at least about 90% of the biological activity compared to the corresponding GLP-2 not linked to XTEN.

[0025] In some embodiments, fusion proteins comprising GLP-2 and one or more XTEN, wherein the fusion proteins exhibit enhanced pharmacokinetic properties when administered to a subject compared to a GLP-2 not linked to the XTEN, wherein the enhanced properties include but are not limited to longer terminal half-life, larger area under the curve, increased time in which the blood concentration remains within the therapeutic window, increased time between consecutive doses resulting in blood concentrations within the therapeutic window, increased time between Cₘₐₓ and Cₘᵢₙ blood concentrations when consecutive doses are administered, and decreased cumulative dose over time required to be administered compared to a GLP-2 not linked to the XTEN, yet still result in a blood concentration within the therapeutic window. A subject to which a GLP-2-XTEN composition is administered can include but is not limited to mouse, rat, monkey and human. In some embodiments, the terminal half-life of the fusion protein administered to a subject is increased at least about three-fold, or at least about four-fold, or at least about five-fold, or at least about six-fold, or at least about eight-fold, or at least about ten-fold, or at least about 20-fold, or at least about 40-fold, or at least about 60-fold, or at least about 100-fold, or even longer as compared to the corresponding recombinant GLP-2 not linked to the XTEN when the corresponding GLP-2 is administered to a subject at a comparable dose. In other embodiments, the terminal half-life of the fusion protein administered to a subject is at least about 12 h, or at least about 24 h, or at least about 48 h, or at least about 72 h, or at least about 96 h, or at least about 120 h, or at least about 144 h, or at least about 21 days or greater. In other embodiments, the enhanced pharmacokinetic property is reflected by the fact that the blood concentrations remain within the therapeutic window for the fusion protein for a period that is at least about two-fold, or at least about three-fold, or at least about four-fold, or at least about five-fold, or at least about six-fold, or at least about eight-fold, or at least about ten-fold longer, or at least about 20-fold, or at least about 40-fold, or at least about 60-fold, or at least about 100-fold greater compared to the corresponding GLP-2 not linked to the XTEN when thee corresponding GLP-2 is administered to a subject at a comparable dose. The increase in half-life and time spent within the therapeutic window permits less frequent dosing and decreased amounts of the fusion protein (in nmoles/kg equivalent) that are administered to a subject, compared to the corresponding GLP-2 not linked to the XTEN. In one embodiment, administration of three or more doses of a GLP2-XTEN fusion protein to a subject in need thereof using a therapeutically-effective dose regimen results in a gain in time of at least two-fold, or at least three-fold, or at least four-fold, or at least five-fold, or at least six-fold, or at least eight-fold, or at least 10-fold, or at least about 20-fold, or at least about 40-fold, or at least about 60-fold, or at least about 100-fold or higher between at least two consecutive Cₘₐₓ peaks and/or Cₘᵢₙ troughs for blood levels of the fusion protein compared to the corresponding GLP-2 not linked to the XTEN and administered using a comparable dose regimen to a subject. In one embodiment, the GLP2-XTEN administered using a therapeutically effective amount to a subject in need thereof results in blood concentrations of the GLP2-XTEN fusion protein that remain above at least about 500 ng/ml, at least about 1000 ng/ml, or at least about 2000 ng/ml, or at least about 3000 ng/ml, or at least about 4000 ng/ml, or at least about 5000 ng/ml, or at least about 10000 ng/ml, or at least about 15000 ng/ml, or at least about 20000 ng/ml, or at least about 30000 ng/ml, or at least about 40000 ng/ml for at least about 24 hours, or at least about 48 hours, or at least about 72 hours, or at least about 96 hours, or at least about 120 hours, or at least about 144 hours. In another embodiment, the GLP2-XTEN administered at an appropriate dose to a subject results in area under the curve concentrations of the GLP2-XTEN fusion protein of at least 100000 hr*ng/mL, or at least about 200000 hr*ng/mL, or at least about 400000 hr*ng/mL, or at least about 600000 hr*ng/mL, or at least about 800000 hr*ng/mL, or at least about 1000000 hr*ng/mL, or at least about 2000000 hr*ng/mL after a single dose. In one embodiment, the GLP2-XTEN fusion protein has a terminal half-life that results in a gain in time between consecutive doses necessary to maintain a therapeutically effective dose regimen of at least 48 h, or at least 72 h, or at least about 96 h, or at least about 120 h, or at least about 7 days, or at least about 14 days, or at least about 21 days between consecutive doses compared to the regimen of a GLP-2 not linked to XTEN and administered at a comparable dose.

[0026] In one embodiment, the GLP2-XTEN fusion protein is characterized in that when an equivalent amount, in nmoles/kg of the fusion protein and the corresponding GLP-2 that lacks the XTEN are each administered to comparable subjects, the fusion protein achieves a terminal half-life in the subject that is at least about 3-fold, or at least 4-fold, or at least 5-fold, or at least 10-fold, or at least 15-fold, or at least 20-fold longer compared to the corresponding GLP-2 that lacks the XTEN. In another embodiment, the GLP2-XTEN fusion protein is characterized in that when a 2-fold, or 3-fold, or 4-fold, or 5-fold, or 6-fold smaller amount, in nmoles/kg, of the fusion protein than the corresponding GLP-2 that lacks the XTEN are each administered to comparable subjects with a gastrointestinal condition, the fusion protein achieves a comparable therapeutic effect in the subject as the corresponding GLP-2 that lacks the XTEN. In another embodiment, the GLP2-XTEN fusion protein is characterized in that when the fusion protein is administered to a subject in consecutive doses to a subject using a dose interval that is at least about 2-fold, or at least 3-fold, or at least 4-fold, or at least 5-fold, or at least 10-fold, or at least 15-fold, or at least 20-fold longer as compared to a dose interval for the corresponding GLP-2 that lacks the XTEN and is administered to a comparable subject using an otherwise equivalent nmoles/kg amount, the fusion protein achieves a similar blood concentration in the subject as compared to the corresponding GLP-2 that lacks the XTEN. In another embodiment, the GLP2-XTEN fusion protein is characterized in that when the fusion protein is administered to a subject in consecutive doses to a subject using a dose interval that is at least about 3-fold, or at least 4-fold, or at least 5-fold, or at least 10-fold, or at least 15-fold, or at least 20-fold longer as compared to a dose interval for the corresponding GLP-2 that lacks the XTEN and is administered to a comparable subject using an otherwise equivalent nmoles/kg amount, the fusion protein achieves a comparable therapeutic effect in the subject as the corresponding GLP-2 that lacks the XTEN. In another embodiment, the GLP2-XTEN fusion protein exhibits any combination of, or all of the foregoing characterisitics of this paragraph. In the embodiments of this paragraph, the subject to which the subject composition is administered can include but is not, limited to mouse, rat, monkey, and human. In one embodiment, the subject is rat. In another embodiment, the subject is human.

[0027] In one embodiment, the administration of a GLP2-XTEN fusion protein to a subject results in a greater therapeutic effect compared to the effect seen with the corresponding GLP-2 not linked to XTEN. In another embodiment, the administration of an effective amount the fusion protein results in a greater therapeutic effect in a subject with enteritis compared to the corresponding GLP-2 not linked to XTEN and administered to a comparable subject using a comparable nmoles/kg amount. In the foregoing, the subject is selected from the group consisting of mouse, rat, monkey, and human. In one embodiment of the foregoing, the subject is human and the enteritis is Crohn's disease. In another embodiment of the foregoing, the subject is rat subject and the enteritis is induced with indomethacin. In the foregoing embodiments of this paragraph, the greater therapeutic effect is selected from the group consisting of body weight gain, small intestine length, reduction in TNF a content of the small intestine tissue, reduced mucosal atrophy, reduced incidence of perforated ulcers, and height of villi. In one embodiment, the administration of a GLP2-XTEN fusion protein to a subject results in an increase in small intestine weight of at least about 10%, or at least about 20%, or at least about 30%, or at least about 40% greater compared to that of the corresponding GLP-2 not linked to XTEN. In another embodiment of the administration of a GLP2-XTEN fusion protein to a subject, the administration results in an increase in small intestine length of at least about 5%, or at least about 6%, or at least about 7%, or at least about 8%, or at least about 9%, or at least about 10%, or at least about 20%, or at least about 30%, or at least about 40% greater compared to that of the corresponding GLP-2 not linked to XTEN. In another embodiment of the administration of a GLP2-XTEN fusion protein to a subject, the administration results in an increase in body weight is at least about 5%, or at least about 6%, or at least about 7%, or at least about 8%, or at least about 9%, or at least about 10%, or at least about 20%, or at least about 30%, or at least about 40% greater compared to that of the corresponding GLP-2 not linked to XTEN. In another embodiment of the administration of a GLP2-XTEN fusion protein to a subject, the administration results a reduction in TNFα content of at least about 0.5 ng/g, or at least about 0.6 ng/g, or at least about 0.7 ng/g, or at least about 0.8 ng/g, or at least about 0.9 ng/g, or at least about 1.0 ng/g, or at least about 1.1 ng/g, or at least about 1.2 ng/g, or at least about 1.3 ng/g, or at least about 1.4 ng/g of small intestine tissue or greater compared to that of the corresponding GLP-2 not linked to XTEN. In another embodiment of the administration of a GLP2-XTEN fusion protein to a subject, the administration results in an increase in villi height of at least about 5%, or at least about 6%, or at least about 7%, or at least about 8%, or at least about 9%, or at least about 10%, or at least about 11%, or at least about 12% greater compared to that of the corresponding GLP-2 not linked to XTEN. In the foregoing embodiments of this paragraph, the fusion protein is administered as 1, or 2, or 3, or 4, or 5, or 6, or 10, or 12 or more consecutive doses, wherein the dose amount is at least about 5, or least about 10, or least about 25, or least about 100, or least about 200 nmoles/kg.

[0028] In one embodiment, the GLP2-XTEN recombinant fusion protein comprises a GLP-2 linked to the XTEN via a cleavage sequence that is cleavable by a mammalian protease including but not limited to factor XIa, factor XIIa, kallikrein, factor VIIa, factor IXa, factor Xa, factor IIa (thrombin), Elastase-2, MMP-12, MMP13, MMP-17 and MMP-20, wherein cleavage at the cleavage sequence by the mammalian protease releases the GLP-2 sequence from the XTEN sequence, and wherein the released GLP-2 sequence exhibits an increase in receptor binding activity of at least about 30% compared to the uncleaved fusion protein.

[0029] The present invention provides methods of producing the GLP2-XTEN fusion proteins. In some embodiments, the method of producing a fusion protein comprising GLP-2 fused to one or more extended recombinant polypeptides (XTEN), comprises providing a host cell comprising a recombinant nucleic acid encoding the fusion protein of any of the embodiments described herein; culturing the host cell under conditions permitting the expression of the fusion protein; and recovering the fusion protein. In one embodiment of the method, the the host cell is a prokaryotic cell. In another embodiment of the method, the host cell is E. coli. In another embodiment of the method, the fusion protein is recovered from the host cell cytoplasm in substantially soluble form. In another embodiment of the method, the recombinant nucleic molecule has a sequence with at least 90%, or at least about 91%, or at least about 92%, or at least about 93%, or at least about 94%, or at least about 95%, or at least about 96%, or at least about 97%, or at least about 98%, or at least about 99%, or about 100% sequence identity to a sequence selected from the group consisting of the DNA sequences set forth in Table 13, when optimally aligned, or the complement thereof.

[0030] The present invention provides isolated nucleic acids encoding the GLP2-XTEN fusion proteins, vectors, and host cells comprising the vectors and nucleic acids. In one embodiment, the invention provides an isolated nucleic acid comprising a nucleic acid sequence that has at least 70%, or at least about 80%, or at least about 90%, or at least about 91%, or at least about 92%, or at least about 93%, or at least about 94%, or at least about 95%, or at least about 96%, or at least about 97%, or at least about 98%, or at least about 99%, or 100% sequence identity to a DNA sequence selected from Table 13, or the complement thereof. In another embodiment, the invention provides a nucleotide sequence encoding the fusion protein of any of fusion protein embodiments described herein, or the complement thereof. In another embodiment, the invention provides an expression vector or isolated host cell comprising the nucleic acid of the foregoing embodiments of this paragraph. In another embodiment, the invention provides a host cell comprising the foregoing expression vector.

[0031] Additionally, the present invention provides pharmaceutical compositions comprising the fusion protein of any of the foregoing embodiments described herein and a pharmaceutically acceptable carrier. In addition, the present invention provides pharmaceutical compositions comprising the fusion protein of any of the foregoing embodiments described herein for use in treating a gastrointestinal condition in a subject. In one embodiment, administration of a therapeutically effective amount of the pharmaceutical composition to a subject with a gastrointestinal condition results in maintaining blood concentrations of the fusion protein within a therapeutic window for the fusion protein at least three-fold longer compared to the corresponding GLP-2 not linked to the XTEN and administered at a comparable amount to the subject. In another embodiment, administration of three or more doses of the pharmaceutical composition to a subject with a gastrointestinal condition using a therapeutically-effective dose regimen results in a gain in time of at least four-fold between at least two consecutive Cₘₐₓ peaks and/or Cₘᵢₙ troughs for blood levels of the fusion protein compared to the corresponding GLP-2 not linked to the XTEN and administered using a comparable dose regimen to a subject. In another embodiment, the intravenous, subcutaneous, or intramuscular administration of the pharmaceutical composition comprising at least about 5, or least about 10, or least about 25, or least about 100, or least about 200 nmoles/kg of the fusion protein to a subject results in fusion protein blood levels maintained above 1000 ng/ml for at least 72 hours. In the foregoing embodiments of the paragraph, the gastrointestinal condition is selected from the group consisting of gastritis, digestion disorders, malabsorption syndrome, short-gut syndrome, short bowel syndrome, cul-de-sac syndrome, inflammatory bowel disease, celiac disease, tropical sprue, hypogammaglobulinemic sprue, Crohn's disease, ulcerative colitis, enteritis, chemotherapy-induced enteritis, irritable bowel syndrome, small intestine damage, small intestinal damage due to cancer-chemotherapy, gastrointestinal injury, diarrheal diseases, intestinal insufficiency, acid-induced intestinal injury, arginine deficiency, idiopathic hypospermia, obesity, catabolic illness, febrile neutropenia, diabetes, obesity, steatorrhea, autoimmune diseases, food allergies, hypoglycemia, gastrointestinal barrier disorders, sepsis, bacterial peritonitis, burn-induced intestinal damage, decreased gastrointestinal motility, intestinal failure, chemotherapy-associated bacteremia, bowel trauma, bowel ischemia, mesenteric ischemia, malnutrition, necrotizing enterocolitis, necrotizing pancreatitis, neonatal feeding intolerance, NSAID-induced gastrointestinal damage, nutritional insufficiency, total parenteral nutrition damage to gastrointestinal tract, neonatal nutritional insufficiency, radiation-induced enteritis, radiation-induced injury to the intestines, mucositis, pouchitis, and gastrointestinal ischemia. In the foregoing embodiments of the paragraph, the subject is selected from mouse, rat, monkey and human.

[0032] In another embodiment, the present invention provides a GLP2-XTEN fusion protein according to any of the embodiments described herein for use in the preparation of a medicament for the treatment of a gastrointestinal condition described herein.

[0033] The present invention provides GLP2-XTEN fusion proteins according to any of the embodiments described herein for use in a method of treating a gastrointestinal condition in a subject, comprising administering to the subject a therapeutically effective amount of the fusion protein. In one embodiment, the gastrointestinal condition is selected from the group consisting of gastritis, digestion disorders, malabsorption syndrome, short-gut syndrome, short bowel syndrome, cul-de-sac syndrome, inflammatory bowel disease, celiac disease, tropical sprue, hypogammaglobulinemic sprue, Crohn's disease, ulcerative colitis, enteritis, chemotherapy-induced enteritis, irritable bowel syndrome, small intestine damage, small intestinal damage due to cancer-chemotherapy, gastrointestinal injury, diarrheal diseases, intestinal insufficiency, acid-induced intestinal injury, arginine deficiency, idiopathic hypospermia, obesity, catabolic illness, febrile neutropenia, diabetes, obesity, steatorrhea, autoimmune diseases, food allergies, hypoglycemia, gastrointestinal barrier disorders, sepsis, bacterial peritonitis, burn-induced intestinal damage, decreased gastrointestinal motility, intestinal failure, chemotherapy-associated bacteremia, bowel trauma, bowel ischemia, mesenteric ischemia, malnutrition, necrotizing enterocolitis, necrotizing pancreatitis, neonatal feeding intolerance, NSAID-induced gastrointestinal damage, nutritional insufficiency, total parenteral nutrition damage to gastrointestinal tract, neonatal nutritional insufficiency, radiation-induced enteritis, radiation-induced injury to the intestines, mucositis, pouchitis, and gastrointestinal ischemia. In another embodiment of the fusion protein for use in a method of treating a gastrointestinal condition in a subject, administration of two or more consecutive doses of the fusion protein administered using a therapeutically effective dose regimen to a subject results in a prolonged period between consecutive Cₘₐₓ peaks and/or Cₘᵢₙ troughs for blood levels of the fusion protein compared to the corresponding GLP-2 that lacks the XTEN and administered using a therapeutically effective dose regimen established for the GLP-2. In another embodiment of the fusion protein for use in a method of treating a gastrointestinal condition in a subject, administration of a smaller amount in nmoles/kg of the fusion protein to a subject in comparison to the corresponding GLP-2 that lacks the XTEN, when administered to a subject under an otherwise equivalent dose regimen, results in the fusion protein achieving a comparable therapeutic effect as the corresponding GLP-2 that lacks the XTEN. In the foregoing, the therapeutic effect is selected from the group consisting of blood concentrations of GLP-2, increased mesenteric blood flow, decreased inflammation, increased weight gain, decreased diarrhea, decreased fecal wet weight, intestinal wound healing, increase in plasma citrulline concentrations, decreased CRP levels, decreased requirement for steroid therapy, enhancing or stimulating mucosal integrity, decreased sodium loss, minimizing, mitigating, or preventing bacterial translocation in the intestines, enhancing, stimulating or accelerating recovery of the intestines after surgery, preventing relapses of inflammatory bowel disease, and maintaining energy homeostasis.

[0034] The present invention provides GLP2-XTEN fusion proteins according to any of the embodiments described herein for use in a pharmaceutical regimen for treatment of a gastrointestinal condition in a subject. In one embodiment, the r pharmaceutical egimen comprises a pharmaceutical composition comprising the GLP2-XTEN fusion protein. In another embodiment, the pharmaceutical regimen further comprises the step of determining the amount of pharmaceutical composition needed to achieve a therapeutic effect in the subject, wherein the therapeutic effect is selected from the group consisting of increased mesenteric blood flow, decreased inflammation, increased weight gain, decreased diarrhea, decreased fecal wet weight, intestinal wound healing, increase in plasma citrulline concentrations, decreased CRP levels, decreased requirement for steroid therapy, enhanced mucosal integrity, decreased sodium loss, preventing bacterial translocation in the intestines, accelerated recovery of the intestines after surgery, prevention of relapses of inflammatory bowel disease, and maintaining energy homeostasis. In another embodiment, the pharmaceutical regimen comprises administering the pharmaceutical composition in two or more successive doses to the subject at an effective amount, wherein the administration results in at least a 5%, or 10%, or 20%, or 30%, or 40%, or 50%, or 60%, or 70%, or 80%, or 90% greater improvement of at least one, two, or three parameters associated with the gastrointestinal condition compared to the GLP-2 not linked to XTEN and administered using a comparable nmol/kg amount. In one embodiment of the foregoing, the parameter improved is selected from increased blood concentrations of GLP-2, increased mesenteric blood flow, decreased inflammation, increased weight gain, decreased diarrhea, decreased fecal wet weight, intestinal wound healing, increase in plasma citrulline concentrations, decreased CRP levels, decreased requirement for steroid therapy, enhanced mucosal integrity, decreased sodium loss, preventing bacterial translocation in the intestines, accelerated recovery of the intestines after surgery, prevention of relapses of inflammatory bowel disease, and maintaining energy homeostasis. In another embodiment, the pharmaceutical regimen comprises administering a therapeutically effective amount of the pharmaceutical composition once every 7, or 10, or 14, or 21, or 28 or more days. In an embodiment of the foregoing, the effective amount is at least about 5, or least about 10, or least about 25, or least about 100, or least about 200 nmoles/kg. In the embodiments of the regimen, the administration is subcutaneous, intramuscular, or intravenous.

[0035] The present invention provides methods of treating a gastrointestinal condition in a subject. In some embodiments, the method comprises administering to said subject a composition comprising an effective amount of a pharmaceutical composition comprising a GLP2-XTEN fusion protein described herein. In one embodiment of the method, the effective amount is at least about 5, or least about 10, or least about 25, or least about 100, or least about 200 nmoles/kg. In another embodiment of the method, administration of the pharmaceutical composition is subcutaneous, intramuscular, or intravenous. In another embodiment of the method, administration of the effective amount results in the fusion protein exhibiting a terminal half-life of greater than about 30 hours in the subject, wherein the subject is selected from the group consisting of mouse, rat, monkey, and human. In the foregoing embodiments, the gastrointestinal condition is selected from the group consisting of gastritis, digestion disorders, malabsorption syndrome, short-gut syndrome, short bowel syndrome, cul-de-sac syndrome, inflammatory bowel disease, celiac disease, tropical sprue, hypogammaglobulinemic sprue, Crohn's disease, ulcerative colitis, enteritis, chemotherapy-induced enteritis, irritable bowel syndrome, small intestine damage, small intestinal damage due to cancer-chemotherapy, gastrointestinal injury, diarrheal diseases, intestinal insufficiency, acid-induced intestinal injury, arginine deficiency, idiopathic hypospermia, obesity, catabolic illness, febrile neutropenia, diabetes, obesity, steatorrhea, autoimmune diseases, food allergies, hypoglycemia, gastrointestinal barrier disorders, sepsis, bacterial peritonitis, burn-induced intestinal damage, decreased gastrointestinal motility, intestinal failure, chemotherapy-associated bacteremia, bowel trauma, bowel ischemia, mesenteric ischemia, malnutrition, necrotizing enterocolitis, necrotizing pancreatitis, neonatal feeding intolerance, NSAID-induced gastrointestinal damage, nutritional insufficiency, total parenteral nutrition damage to gastrointestinal tract, neonatal nutritional insufficiency, radiation-induced enteritis, radiation-induced injury to the intestines, mucositis, pouchitis, and gastrointestinal ischemia. In another embodiment of the method, the method is used to treat a subject with small intestinal damage due to chemotherapeutic agents such as, but not limited to 5-FU, altretamine, bleomycin, busulfan, capecitabine, carboplatin, carmustine, chlorambucil, cisplatin, cladribine, crisantaspase, cyclophosphamide, cytarabine, dacarbazine, dactinomycin, daunorubicin, docetaxel, doxorubicin, epirubicin, etoposide, fludarabine, fluorouracil, gemcitabine, hydroxycarbamide, idarubicin, ifosfamide, irinotecan, liposomal doxorubicin, leucovorin, lomustine, melphalan, mercaptopurine, mesna, methotrexate, mitomycin, mitoxantrone, oxaliplatin, paclitaxel, pemetrexed, pentostatin, procarbazine, raltitrexed, streptozocin, tegafur-uracil, temozolomide, thiotepa, tioguanine, thioguanine, topotecan, treosulfan, vinblastine, vincristine, vindesine, and vinorelbine. In another embodiment of the method, administration of the pharmaceutical composition results in an intestinotrophic effect in said subject. In yet another embodiment of the method, administration of the pharmaceutical composition results in an intestinotrophic effect in said subject, wherein the intestinotrophic effect is at least about 30%, or at least about 40%, or at least about 50%, or at least about 60%, or at least about 70%, or at least about 80%, or at least about 90%, or at least about 100% or at least about 120% or at least about 150% or at least about 200% of the intestinotrophic effect compared to the corresponding GLP-2 not linked to XTEN and administered to a subject using a comparable dose. In one embodiment of the foregoing, the intestinotrophic effect is determined after administration of 1 dose, or 3 doses, or 6 doses, or 10 doses, or 12 or more doses of the fusion protein. In another embodiment of the foregoing, the intestinotrophic effect is selected from the group consisting of intestinal growth, increased hyperplasia of the villus epithelium, increased crypt cell proliferation, increased height of the crypt and villus axis, increased healing after intestinal anastomosis, increased small bowel weight, increased small bowel length, decreased small bowel epithelium apoptosis, and enhancement of intestinal function.

[0036] In another embodiment, the present invention provides kits, comprising packaging material and at least a first container comprising the pharmaceutical composition comprising a GLP2-XTEN fusion protein described herein and a sheet of instructions for the reconstitution and/or administration of the pharmaceutical compositions to a subject.

[0037] The following are non-limiting exemplary embodiments of the invention:

Item 1. A recombinant fusion protein comprising a glucagon-like protein-2 (GLP-2) and an extended recombinant polypeptide (XTEN), wherein the XTEN is characterized in that:
[0038] (a) the XTEN comprises at least 36 amino acid residues;
[0039] (b) the sum of glycine (G), alanine (A), serine (S), threonine (T), glutamate (E) and proline (P) residues constitutes more than about 80% of the total amino acid residues of the XTEN;
[0040] (c) the XTEN is substantially non-repetitive such that (i) the XTEN contains no three contiguous amino acids that are identical unless the amino acids are serine; (ii) at least about 80% of the XTEN sequence consists of non-overlapping sequence motifs, each of the sequence motifs comprising about 9 to about 14 amino acid residues consisting of four to six amino acids selected from glycine (G), alanine (A), serine (S), threonine (T), glutamate (E) and proline (P), wherein any two contiguous amino acid residues do not occur more than twice in each of the non-overlapping sequence motifs; or (iii) the XTEN sequence has a subsequence score of less than 10;
[0041] (d) the XTEN has greater than 90% random coil formation as determined by GOR algorithm;
[0042] (e) the XTEN has less than 2% alpha helices and 2% beta-sheets as determined by Chou-Fasman algorithm; and
[0043] (f) the XTEN lacks a predicted T-cell epitope when analyzed by TEPITOPE algorithm, wherein the TEPITOPE threshold score for said prediction by said algorithm has a threshold of −9, wherein said fusion protein exhibits an apparent molecular weight factor of at least about 4 and exhibits an intestinotrophic effect when administered to a subject using a therapeutically effective amount.
   Item 2. The recombinant fusion protein of item 1, wherein the intestinotrophic effect is at least about 30%, or at least about 40%, or at least about 50%, or at least about 60%, or at least about 70%, or at least about 80%, or at least about 90%, or at least about 100% or at least about 120% or at least about 150% or at least about 200% of the intestinotrophic effect compared to the corresponding GLP-2 not linked to XTEN when the corresponding GLP-2 is administered to a subject using a comparable dose.
   Item 3. The recombinant fusion protein of item 1, wherein the subject is selected from the group consisting of mouse, rat, monkey, and human.
   Item 4. The recombinant fusion protein of any one of the preceding items, wherein said administration is subcutaneous, intramuscular, or intravenous.
   Item 5. The recombinant fusion protein of any one of the preceding items, wherein the intestinotrophic effect is determined after administration of 1 dose, or 3 doses, or 6 doses, or 10 doses, or 12 or more doses of the fusion protein.
   Item 6. The recombinant fusion protein of any one of the preceding items, wherein the intestinotrophic effect is selected from the group consisting of intestinal growth, increased hyperplasia of the villus epithelium, increased crypt cell proliferation, increased height of the crypt and villus axis, increased healing after intestinal anastomosis, increased small bowel weight, increased small bowel length, decreased small bowel epithelium apoptosis, and enhancement of intestinal function.
   Item 7. The recombinant fusion protein of Item 6, wherein the administration results in an increase in small intestine weight of at least about 10%, or at least about 20%, or at least about 30%.
   Item 8. The recombinant fusion protein of Item 6, wherein the administration results in an increase in small intestine length of at least about 5%, or at least about 6%, or at least about 7%, or at least about 8%, or at least about 9%, or at least about 10%, or at least about 20%, or at least about 30%.
   Item 9. The recombinant fusion protein of any one of the preceding items, wherein the GLP-2 sequence has at least 90%, or at least about 91%, or at least about 92%, or at least about 93%, or at least about 94%, or at least about 95%, or at least about 96%, or at least about 97%, or at least about 98%, or at least about 99%, or 100% sequence identity to a sequence selected from the group consisting of the sequences in Table 1, when optimally aligned.
   Item 10. The recombinant fusion protein of any one of the preceding items, wherein the GLP-2 comprises human GLP-2.
   Item 11. The recombinant fusion protein of any one of Item 9-Item 11, wherein the GLP-2 is selected from the group consisting of bovine GLP-2, pig GLP-2, sheep GLP-2, chicken GLP-2, and canine GLP-2.
   Item 12. The recombinant fusion protein of any one of the preceding items, wherein the GLP-2 has an amino acid substitution in place of Ala², and wherein the substitution is glycine.
   Item 13. The recombinant fusion protein of any one of Item 1-Item 9, wherein the GLP-2 has the sequence HGDGSFSDEMNTILDNLAARDFINWLIQTKITD (SEQ ID NO: 1).
   Item 14. The recombinant fusion protein any one of the preceding items, wherein the XTEN is linked to the C-terminus of the GLP-2.
   Item 15. The recombinant fusion protein of Item 14, further comprising a spacer sequence of 1 to about 50 amino acid residues linking the GLP-2 and XTEN components.
   Item 16. The recombinant fusion protein of Item 15, wherein the spacer sequence is a glycine residue.
   Item 17. The recombinant fusion protein of any one of the preceding items, wherein the XTEN is characterized in that:
[0044] (a) the total XTEN amino acid residues is at least 36 to about 3000 amino acid residues; and
[0045] (b) the sum of glycine (G), alanine (A), serine (S), threonine (T), glutamate (E) and proline (P) residues constitutes at least about 90% of the total amino acid residues of the XTEN;
   Item 18. The recombinant fusion protein of any one of the preceding items, wherein the XTEN is characterized in that the sum of asparagine and glutamine residues is less than 10% of the total amino acid sequence of the XTEN.
   Item 19. The recombinant fusion protein of any one of the preceding items, wherein the XTEN is characterized in that the sum of methionine and tryptophan residues is less than 2% of the total amino acid sequence of the XTEN.
   Item 20. The recombinant fusion protein any one of the preceding items, wherein the XTEN has at least 90%, or at least about 91%, or at least about 92%, or at least about 93%, or at least about 94%, or at least about 95%, or at least about 96%, or at least about 97%, or at least about 98%, or at least about 99%, or about 100% sequence identity when compared to a sequence of comparable length selected from any one of Table 4, Table 8, Table 9, Table 10, Table 11, and Table 12, when optimally aligned.
   Item 21. The recombinant fusion protein any one of the preceding items, wherein the XTEN has at least 90%, or at least about 91%, or at least about 92%, or at least about 93%, or at least about 94%, or at least about 95%, or at least about 96%, or at least about 97%, or at least about 98%, or at least about 99%, or about 100% sequence identity when compared to an AE864 sequence from Table 4, when optimally aligned.
   Item 22. The recombinant fusion protein of any one of Item 1-Item 9 or Item 13, wherein the fusion protein sequence has a sequence with at least 90%, or at least about 91%, or at least about 92%, or at least about 93%, or at least about 94%, or at least about 95%, or at least about 96%, or at least about 97%, or at least about 98%, or at least about 99%, or 100% sequence identity to the sequence set forth in FIG. 28.
   Item 23. The recombinant fusion protein of any one of the preceding items, wherein the fusion protein exhibits a terminal half-life that is at least about 30 hours when administered to a subject.
   Item 24. The recombinant fusion protein of any one of the preceding items, wherein the fusion protein binds to a GLP-2 receptor with an EC₅₀ of less than about 30 nM, or about 100 nM, or about 200 nM, or about 300 nM, or about 370 nM, or about 400 nM, or about 500 nM, or about 600 nM, or about 700 nM, or about 800 nM, or about 1000 nM, or about 1200 nM, or about 1400 nM when assayed using an in vitro GLP2R cell assay wherein the GLP2R cell is a human recombinant GLP-2 glucagon family receptor calcium-optimized cell.
   Item 25. The recombinant fusion protein of any one of the preceding items, wherein the fusion protein retains at least about 1%, or about 2%, or about 3%, or about 4%, or about 5%, or about 10%, or about 20%, or about 30% of the potency of the corresponding GLP-2 not linked to XTEN when assayed using an in vitro GLP2R cell assay wherein the GLP2R cell is a human recombinant GLP-2 glucagon family receptor calcium-optimized cell.
   Item 26. The recombinant fusion protein of any one of the preceding items, characterized in that
[0046] (a) when an equivalent amount, in nmoles/kg, of the fusion protein and the corresponding GLP-2 that lacks the XTEN are each administered to comparable subjects, the fusion protein achieves a terminal half-life in the subject that is at least about 3-fold, or at least 4-fold, or at least 5-fold, or at least 10-fold, or at least 15-fold, or at least 20-fold longer compared to the corresponding GLP-2 that lacks the XTEN;
[0047] (b) when a 2-fold, or 3-fold, or 4-fold, or 5-fold, or 6-fold smaller amount, in nmoles/kg, of the fusion protein than the corresponding GLP-2 that lacks the XTEN are each administered to comparable subjects with a gastrointestinal condition, the fusion protein achieves a comparable therapeutic effect in the subject as the corresponding GLP-2 that lacks the XTEN;
[0048] (c) when the fusion protein is administered to a subject in consecutive doses to a subject using a dose interval that is at least about 2-fold, or at least 3-fold, or at least 4-fold, or at least 5-fold, or at least 10-fold, or at least 15-fold, or at least 20-fold longer as compared to a dose interval for the corresponding GLP-2 that lacks the XTEN and is administered to a comparable subject using an otherwise equivalent nmoles/kg amount, the fusion protein achieves a similar blood concentration in the subject as compared to the corresponding GLP-2 that lacks the XTEN; or
[0049] (d) when the fusion protein is administered to a subject in consecutive doses to a subject using a dose interval that is at least about 3-fold, or at least 4-fold, or at least 5-fold, or at least 10-fold, or at least 15-fold, or at least 20-fold longer as compared to a dose interval for the corresponding GLP-2 that lacks the XTEN and is administered to a comparable subject using an otherwise equivalent nmoles/kg amount, the fusion protein achieves a comparable therapeutic effect in the subject as the corresponding GLP-2 that lacks the XTEN.
   Item 27. The recombinant fusion protein of Item 26, wherein the subject is selected from the group consisting of mouse, rat, monkey, and human.
   Item 28. The recombinant fusion protein of Item 27, wherein the subject is rat.
   Item 29. The recombinant fusion protein of any one of Item 26-Item 28, wherein the administration results in a greater therapeutic effect compared to the effect seen with the corresponding GLP-2 not linked to XTEN.
   Item 30. The recombinant fusion protein of any one of Item 26-Item 29, wherein administration of an effective amount the fusion protein results in a greater therapeutic effect in a subject with enteritis compared to the corresponding GLP-2 not linked to XTEN when the corresponding GLP-2 is administered to a comparable subject using a comparable nmoles/kg amount.
   Item 31. The recombinant fusion protein of any one of Item 26-Item 30, wherein the subject is selected from the group consisting of mouse, rat, monkey, and human.
   Item 32. The recombinant fusion protein of Item 31, wherein the subject is human and the enteritis is Crohn's disease.
   Item 33. The recombinant fusion protein of Item 31, wherein the subject is rat subject and the enteritis is induced with indomethacin.
   Item 34. The recombinant fusion protein of any one of Item 29-Item 33, wherein the greater therapeutic effect is selected from the group consisting of body weight gain, small intestine length, reduction in TNFα content of the small intestine tissue, reduced mucosal atrophy, reduced incidence of perforated ulcers, and height of villi.
   Item 35. The recombinant fusion protein of Item 34, wherein the administration results in an increase in small intestine weight of at least about 10%, or at least about 20%, or at least about 30%, or at least about 40% greater compared to that of the corresponding GLP-2 not linked to XTEN.
   Item 36. The recombinant fusion protein of Item 34, wherein the administration results in an increase in small intestine length of at least about 5%, or at least about 6%, or at least about 7%, or at least about 8%, or at least about 9%, or at least about 10%, or at least about 20%, or at least about 30%, or at least about 40% greater compared to that of the corresponding GLP-2 not linked to XTEN.
   Item 37. The recombinant fusion protein of Item 34, wherein the administration results in an increase in body weight is at least about 5%, or at least about 6%, or at least about 7%, or at least about 8%, or at least about 9%, or at least about 10%, or at least about 20%, or at least about 30%, or at least about 40% greater compared to that of the corresponding GLP-2 not linked to XTEN.
   Item 38. The recombinant fusion protein of Item 34, wherein the reduction in TNFα content is at least about 0.5 ng/g, or at least about 0.6 ng/g, or at least about 0.7 ng/g, or at least about 0.8 ng/g, or at least about 0.9 ng/g, or at least about 1.0 ng/g, or at least about 1.1 ng/g, or at least about 1.2 ng/g, or at least about 1.3 ng/g, or at least about 1.4 ng/g of small intestine tissue or greater compared to that of the corresponding GLP-2 not linked to XTEN.
   Item 39. The recombinant fusion protein of Item 34, wherein the villi height is at least about 5%, or at least about 6%, or at least about 7%, or at least about 8%, or at least about 9%, or at least about 10%, or at least about 11%, or at least about 12% greater compared to that of the corresponding GLP-2 not linked to XTEN.
   Item 40. The recombinant fusion protein of any one of Item 29-Item 39, wherein the fusion protein is administered as 1, or 2, or 3, or 4, or 5, or 6, or 10, or 12 or more consecutive doses.
   Item 41. The recombinant fusion protein of any one of Item 30-Item 40, wherein the effective amount is at least about 5, or least about 10, or least about 25, or least about 100, or least about 200 nmoles/kg.
   Item 42. The recombinant fusion protein of any one of the preceding items, wherein the GLP-2 is linked to the XTEN via a cleavage sequence that is cleavable by a mammalian protease selected from the group consisting of factor XIa, factor XIIa, kallikrein, factor VIIa, factor IXa, factor Xa, factor IIa (thrombin), Elastase-2, MMP-12, MMP13, MMP-17 and MMP-20, wherein cleavage at the cleavage sequence by the mammalian protease releases the GLP-2 sequence from the XTEN sequence, and wherein the released GLP-2 sequence exhibits an increase in receptor binding activity of at least about 30% compared to the uncleaved fusion protein.
   Item 43. A method of producing a fusion protein comprising GLP-2 fused to one or more extended recombinant polypeptides (XTEN), comprising:
[0050] (a) providing a host cell comprising a recombinant nucleic acid encoding the fusion protein of any one of items 1 to Item 41;
[0051] (b) culturing the host cell under conditions permitting the expression of the fusion protein; and
[0052] (c) recovering the fusion protein.
   Item 44. The method of Item 43, wherein:
[0053] (a) the host cell is a prokaryotic cell; or
[0054] (b) the fusion protein is recovered from the host cell cytoplasm in substantially soluble form.
   Item 45. The method of Item 43, wherein the recombinant nucleic acid molecule has a sequence with at least 90%, or at least about 91%, or at least about 92%, or at least about 93%, or at least about 94%, or at least about 95%, or at least about 96%, or at least about 97%, or at least about 98%, or at least about 99%, or about 100% sequence identity to a sequence selected from the group consisting of the DNA sequences set forth in Table 13, when optimally aligned, or the complement thereof.
   Item 46. An isolated nucleic acid comprising:
[0055] (a) a nucleic acid sequence that has at least 70%, or at least about 80%, or at least about 90%, or at least about 91%, or at least about 92%, or at least about 93%, or at least about 94%, or at least about 95%, or at least about 96%, or at least about 97%, or at least about 98%, or at least about 99%, or about 100% sequence identity to a DNA sequence selected from Table 13, or the complement thereof; or
[0056] (b) a nucleotide sequence encoding the fusion protein of any of items 1-Item 41, or the complement thereof.
   Item 47. An expression vector or isolated host cell comprising the nucleic acid of any one of Item 43-Item 46.
   Item 48. A host cell comprising the expression vector of Item 47.
   Item 49. A pharmaceutical composition comprising the fusion protein of 1-Item 41, and a pharmaceutically acceptable carrier.
   Item 50. The recombinant fusion protein of item 1 configured according to formula V:

(a)(GLP-2)-(S)ₓ-(XTEN) (V)

wherein independently for each occurrence,
[0057] (b) GLP-2 is a sequence having at least 90%, or at least about 91%, or at least about 92%, or at least about 93%, or at least about 94%, or at least about 95%, or at least about 96%, or at least about 97%, or at least about 98%, or at least about 99%, or about 100% sequence identity to a sequence selected from the group consisting of the sequences in Table 1, when optimally aligned;
[0058] (c) S is a spacer sequence having between 1 to about 50 amino acid residues that can optionally include a cleavage sequence from Table 6 or amino acids compatible with restrictions sites; and
[0059] (d) xis either 0 or 1;
   Item 51. The recombinant fusion protein of Item 50, wherein the GLP-2 comprises human GLP-2.
   Item 52. The recombinant fusion protein of Item 50, wherein the GLP-2 is selected from the group consisting of bovine GLP-2, pig GLP-2, sheep GLP-2, chicken GLP-2, and canine GLP-2.
   Item 53. The recombinant fusion protein of Item 51 or item Item 52, wherein the GLP-2 has an amino acid substitution in place of Ala², and wherein the substitution is glycine.
   Item 54. The recombinant fusion protein of Item 50, wherein the GLP-2 has the sequence HGDGSFSDEMNTILDNLAARDFINWLIQTKITD (SEQ ID NO: 1).
   Item 55. The recombinant fusion protein of any one of Item 50-Item 54, comprising a spacer sequence wherein the spacer sequence is a glycine residue.
   Item 56. The recombinant fusion protein any one of Item 50-Item 55, wherein the XTEN has at least 90%, or at least about 91%, or at least about 92%, or at least about 93%, or at least about 94%, or at least about 95%, or at least about 96%, or at least about 97%, or at least about 98%, or at least about 99%, or 100% sequence identity when compared to a sequence of comparable length selected from any one of Table 4, Table 8, Table 9, Table 10, Table 11, and Table 12, when optimally aligned.
   Item 57. The recombinant fusion protein any one of Item 50-Item 55, wherein the XTEN has at least 90%, or at least about 91%, or at least about 92%, or at least about 93%, or at least about 94%, or at least about 95%, or at least about 96%, or at least about 97%, or at least about 98%, or at least about 99%, or 100% sequence identity when compared to a AE864 sequence from Table 4, when optimally aligned.
   Item 58. The pharmaceutical composition of Item 49, wherein administration of a therapeutically effective amount of the pharmaceutical composition to a subject with a gastrointestinal condition results in maintaining blood concentrations of the fusion protein within a therapeutic window for the fusion protein at least three-fold longer compared to the corresponding GLP-2 not linked to the XTEN and administered at a comparable amount to the subject.
   Item 59. The pharmaceutical composition of Item 49, wherein administration of three or more doses of the pharmaceutical composition to a subject with a gastrointestinal condition using a therapeutically-effective dose regimen results in a gain in time of at least four-fold between at least two consecutive Cₘₐₓ peaks and/or Cₘᵢₙ troughs for blood levels of the fusion protein compared to the corresponding GLP-2 not linked to the XTEN and administered using a comparable dose regimen to a subject.
   Item 60. The pharmaceutical composition of Item 59 or Item 60, wherein the gastrointestinal condition is selected from the group consisting of gastritis, digestion disorders, malabsorption syndrome, short-gut syndrome, short bowel syndrome, cul-de-sac syndrome, inflammatory bowel disease, celiac disease, tropical sprue, hypogammaglobulinemic sprue, Crohn's disease, ulcerative colitis, enteritis, chemotherapy-induced enteritis, irritable bowel syndrome, small intestine damage, small intestinal damage due to cancer-chemotherapy, gastrointestinal injury, diarrheal diseases, intestinal insufficiency, acid-induced intestinal injury, arginine deficiency, idiopathic hypospermia, obesity, catabolic illness, febrile neutropenia, diabetes, obesity, steatorrhea, autoimmune diseases, food allergies, hypoglycemia, gastrointestinal barrier disorders, sepsis, bacterial peritonitis, burn-induced intestinal damage, decreased gastrointestinal motility, intestinal failure, chemotherapy-associated bacteremia, bowel trauma, bowel ischemia, mesenteric ischemia, malnutrition, necrotizing enterocolitis, necrotizing pancreatitis, neonatal feeding intolerance, NSAID-induced gastrointestinal damage, nutritional insufficiency, total parenteral nutrition damage to gastrointestinal tract, neonatal nutritional insufficiency, radiation-induced enteritis, radiation-induced injury to the intestines, mucositis, pouchitis, and gastrointestinal ischemia.
   Item 61. The pharmaceutical composition of Item 49, wherein after intravenous, subcutaneous, or intramuscular administration of the pharmaceutical composition comprising at least about 5, or least about 10, or least about 25, or least about 100, or least about 200 nmoles/kg of the fusion protein to a subject, the fusion protein blood levels are maintained above 1000 ng/ml for at least 72 hours.
   Item 62. The pharmaceutical composition of Item 61, wherein the subject is selected from mouse, rat, monkey and human.
   Item 63. A recombinant fusion protein according to any one of 1-Item 41 for use in the manufacture of a medicament for the treatment of a gastrointestinal condition.
   Item 64. The recombinant fusion protein of Item 63 wherein the gastrointestinal condition is selected from the group consisting of gastritis, digestion disorders, malabsorption syndrome, short-gut syndrome, short bowel syndrome, cul-de-sac syndrome, inflammatory bowel disease, celiac disease, tropical sprue, hypogammaglobulinemic sprue, Crohn's disease, ulcerative colitis, enteritis, chemotherapy-induced enteritis, irritable bowel syndrome, small intestine damage, small intestinal damage due to cancer-chemotherapy, gastrointestinal injury, diarrheal diseases, intestinal insufficiency, acid-induced intestinal injury, arginine deficiency, idiopathic hypospermia, obesity, catabolic illness, febrile neutropenia, diabetes, obesity, steatorrhea, autoimmune diseases, food allergies, hypoglycemia, gastrointestinal barrier disorders, sepsis, bacterial peritonitis, burn-induced intestinal damage, decreased gastrointestinal motility, intestinal failure, chemotherapy-associated bacteremia, bowel trauma, bowel ischemia, mesenteric ischemia, malnutrition, necrotizing enterocolitis, necrotizing pancreatitis, neonatal feeding intolerance, NSAID-induced gastrointestinal damage, nutritional insufficiency, total parenteral nutrition damage to gastrointestinal tract, neonatal nutritional insufficiency, radiation-induced enteritis, radiation-induced injury to the intestines, mucositis, pouchitis, ischemia, and stroke.
   Item 65. A recombinant fusion protein according to any one of 1-Item 41 for use in a method of treating a gastrointestinal condition in a subject, comprising administering to the subject a therapeutically effective amount of the fusion protein.
   Item 66. The recombinant fusion protein for use according to Item 65, wherein the gastrointestinal condition is selected from the group consisting of gastritis, digestion disorders, malabsorption syndrome, short-gut syndrome, short bowel syndrome, cul-de-sac syndrome, inflammatory bowel disease, celiac disease, tropical sprue, hypogammaglobulinemic sprue, Crohn's disease, ulcerative colitis, enteritis, chemotherapy-induced enteritis, irritable bowel syndrome, small intestine damage, small intestinal damage due to cancer-chemotherapy, gastrointestinal injury, diarrheal diseases, intestinal insufficiency, acid-induced intestinal injury, arginine deficiency, idiopathic hypospermia, obesity, catabolic illness, febrile neutropenia, diabetes, obesity, steatorrhea, autoimmune diseases, food allergies, hypoglycemia, gastrointestinal barrier disorders, sepsis, bacterial peritonitis, burn-induced intestinal damage, decreased gastrointestinal motility, intestinal failure, chemotherapy-associated bacteremia, bowel trauma, bowel ischemia, mesenteric ischemia, malnutrition, necrotizing enterocolitis, necrotizing pancreatitis, neonatal feeding intolerance, NSAID-induced gastrointestinal damage, nutritional insufficiency, total parenteral nutrition damage to gastrointestinal tract, neonatal nutritional insufficiency, radiation-induced enteritis, radiation-induced injury to the intestines, mucositis, pouchitis, ischemia, and stroke.
   Item 67. The recombinant fusion protein for use according to Item 65, wherein administration of two or more consecutive doses of the fusion protein administered using a therapeutically effective dose regimen to a subject results in a prolonged period between consecutive Cₘₐₓ peaks and/or Cₘᵢₙ troughs for blood levels of the fusion protein compared to the corresponding GLP-2 that lacks the XTEN and administered using a therapeutically effective dose regimen established for the GLP-2.
   Item 68. The recombinant fusion protein for use according to Item 65, wherein a smaller amount in nmoles/kg of the fusion protein is administered to a subject in comparison to the corresponding GLP-2 that lacks the XTEN administered to a subject under an otherwise equivalent dose regimen, and the fusion protein achieves a comparable therapeutic effect as the corresponding GLP-2 that lacks the XTEN.
   Item 69. The recombinant fusion protein for use according to Item 68, wherein the therapeutic effect is selected from the group consisting of blood concentrations of GLP-2, increased mesenteric blood flow, decreased inflammation, increased weight gain, decreased diarrhea, decreased fecal wet weight, intestinal wound healing, increase in plasma citrulline concentrations, decreased CRP levels, decreased requirement for steroid therapy, enhancing or stimulating mucosal integrity, decreased sodium loss, minimizing, mitigating, or preventing bacterial translocation in the intestines, enhancing, stimulating or accelerating recovery of the intestines after surgery, preventing relapses of inflammatory bowel disease, and maintaining energy homeostasis.
   Item 70. A recombinant fusion protein for use in a pharmaceutical regimen for treatment of a gastrointestinal condition in a subject, said regimen comprising a pharmaceutical composition comprising the fusion protein of any one of 1-Item 41.
   Item 71. The recombinant fusion protein of Item 70, wherein the pharmaceutical regimen further comprises the step of determining the amount of pharmaceutical composition needed to achieve a therapeutic effect in the subject, wherein the therapeutic effect is selected from the group consisting of increased mesenteric blood flow, decreased inflammation, increased weight gain, decreased diarrhea, decreased fecal wet weight, intestinal wound healing, increase in plasma citrulline concentrations, decreased CRP levels, decreased requirement for steroid therapy, enhanced mucosal integrity, decreased sodium loss, preventing bacterial translocation in the intestines, accelerated recovery of the intestines after surgery, prevention of relapses of inflammatory bowel disease, and maintaining energy homeostasis.
   Item 72. The recombinant fusion protein of Item 70, wherein the gastrointestinal condition is selected from the group consisting of gastritis, digestion disorders, malabsorption syndrome, short-gut syndrome, short bowel syndrome, cul-de-sac syndrome, inflammatory bowel disease, celiac disease, tropical sprue, hypogammaglobulinemic sprue, Crohn's disease, ulcerative colitis, enteritis, chemotherapy-induced enteritis, irritable bowel syndrome, small intestine damage, small intestinal damage due to cancer-chemotherapy, gastrointestinal injury, diarrheal diseases, intestinal insufficiency, acid-induced intestinal injury, arginine deficiency, idiopathic hypospermia, obesity, catabolic illness, febrile neutropenia, diabetes, obesity, steatorrhea, autoimmune diseases, food allergies, hypoglycemia, gastrointestinal barrier disorders, sepsis, bacterial peritonitis, burn-induced intestinal damage, decreased gastrointestinal motility, intestinal failure, chemotherapy-associated bacteremia, bowel trauma, bowel ischemia, mesenteric ischemia, malnutrition, necrotizing enterocolitis, necrotizing pancreatitis, neonatal feeding intolerance, NSAID-induced gastrointestinal damage, nutritional insufficiency, total parenteral nutrition damage to gastrointestinal tract, neonatal nutritional insufficiency, radiation-induced enteritis, radiation-induced injury to the intestines, mucositis, pouchitis, ischemia, and stroke.
   Item 73. The recombinant fusion protein of Item 70, wherein the pharmaceutical regimen for treating a subject with a gastrointestinal condition comprises administering the pharmaceutical composition in two or more successive doses to the subject at an effective amount, wherein the administration results in at least a 5%, or 10%, or 20%, or 30%, or 40%, or 50%, or 60%, or 70%, or 80%, or 90% greater improvement of at least one, two, or three parameters associated with the gastrointestinal condition compared to the GLP-2 not linked to XTEN and administered using a comparable nmol/kg amount.
   Item 74. The recombinant fusion protein of Item 73, wherein the parameter improved is selected from increased blood concentrations of GLP-2, increased mesenteric blood flow, decreased inflammation, increased weight gain, decreased diarrhea, decreased fecal wet weight, intestinal wound healing, increase in plasma citrulline concentrations, decreased CRP levels, decreased requirement for steroid therapy, enhanced mucosal integrity, decreased sodium loss, preventing bacterial translocation in the intestines, accelerated recovery of the intestines after surgery, prevention of relapses of inflammatory bowel disease, and maintaining energy homeostasis.
   Item 75. The recombinant fusion protein of Item 70, wherein the regimen comprises administering a therapeutically effective amount of the pharmaceutical composition of Item 49 once every 7, or 10, or 14, or 21, or 28 or more days.
   Item 76. The recombinant fusion protein of Item 75, wherein the effective amount is at least about 5, or least about 10, or least about 25, or least about 100, or least about 200 nmoles/kg.
   Item 77. The recombinant fusion protein of any one of Item 73-Item 76, wherein said administration is subcutaneous, intramuscular, or intravenous.
   Item 78. A method of treating a gastrointestinal condition in a subject, comprising administering to said subject a composition comprising an effective amount of the pharmaceutical composition of Item 49.
   Item 79. The method of Item 78, wherein the effective amount is at least about 5, or least about 10, or least about 25, or least about 100, or least about 200 nmoles/kg.
   Item 80. The method of Item 79, wherein the fusion protein exhibits a terminal half-life of greater than about 30 hours in said subject.
   Item 81. The method of any one of Item 78-Item 80, wherein the gastrointestinal condition is selected from the group consisting of gastritis, digestion disorders, malabsorption syndrome, short-gut syndrome, short bowel syndrome, cul-de-sac syndrome, inflammatory bowel disease, celiac disease, tropical sprue, hypogammaglobulinemic sprue, Crohn's disease, ulcerative colitis, enteritis, chemotherapy-induced enteritis, irritable bowel syndrome, small intestine damage, small intestinal damage due to cancer-chemotherapy, gastrointestinal injury, diarrheal diseases, intestinal insufficiency, acid-induced intestinal injury, arginine deficiency, idiopathic hypospermia, obesity, catabolic illness, febrile neutropenia, diabetes, obesity, steatorrhea, autoimmune diseases, food allergies, hypoglycemia, gastrointestinal barrier disorders, sepsis, bacterial peritonitis, burn-induced intestinal damage, decreased gastrointestinal motility, intestinal failure, chemotherapy-associated bacteremia, bowel trauma, bowel ischemia, mesenteric ischemia, malnutrition, necrotizing enterocolitis, necrotizing pancreatitis, neonatal feeding intolerance, NSAID-induced gastrointestinal damage, nutritional insufficiency, total parenteral nutrition damage to gastrointestinal tract, neonatal nutritional insufficiency, radiation-induced enteritis, radiation-induced injury to the intestines, mucositis, pouchitis, ischemia, and stroke.
   Item 82. The method of Item 81, wherein the gastrointestinal condition is Crohn's disease.
   Item 83. The method of any one of Item 78-Item 82, wherein the subject is selected from the group consisting of mouse, rat, monkey, and human.
   Item 84. The method of any one of Item 78-Item 83, wherein said administration is subcutaneous, intramuscular, or intravenous.
   Item 85. The method of any one of Item 78-Item 84, wherein said administration results in an intestinotrophic effect in said subject.
   Item 86. The method of Item 85, wherein the intestinotrophic effect is at least about 30%, or at least about 40%, or at least about 50%, or at least about 60%, or at least about 70%, or at least about 80%, or at least about 90%, or at least about 100% or at least about 120% or at least about 150% or at least about 200% of the intestinotrophic effect compared to the corresponding GLP-2 not linked to XTEN and administered to a subject using a comparable dose.
   Item 87. The method of Item 85 or Item 86, wherein the intestinotrophic effect is determined after administration of 1 dose, or 3 doses, or 6 doses, or 10 doses, or 12 or more doses of the fusion protein.
   Item 88. The method of any one of Item 85-Item 87, wherein the intestinotrophic effect is selected from the group consisting of intestinal growth, increased hyperplasia of the villus epithelium, increased crypt cell proliferation, increased height of the crypt and villus axis, increased healing after intestinal anastomosis, increased small bowel weight, increased small bowel length, decreased small bowel epithelium apoptosis, and enhancement of intestinal function.

[0060] It is specifically contemplated that the recombinant GLP2-XTEN fusion proteins can exhibit one or more or any combination of the properties disclosed herein.

### INCORPORATION BY REFERENCE

[0061] All publications, patents, and patent applications mentioned in this specification are herein incorporated by reference to the same extent as if each individual publication, patent, or patent application was specifically and individually indicated to be incorporated by reference.

### BRIEF DESCRIPTION OF THE DRAWINGS

[0062] The features and advantages of the invention may be further explained by reference to the following detailed description and accompanying drawings that sets forth illustrative embodiments.

[0063] FIG. 1 is a schematic of the logic flow chart of the algorithm SegScore. In the figure the following legend applies: i, j—counters used in the control loops that run through the entire sequence; HitCount—this variable is a counter that keeps track of how many times a subsequence encounters an identical subsequence in a block; SubSeqX—this variable holds the subsequence that is being checked for redundancy; SubSeqY—this variable holds the subsequence that the SubSeqX is checked against; BlockLen—this variable holds the user determined length of the block; SegLen—this variable holds the length of a segment. The program is hardcoded to generate scores for subsequences of lengths 3, 4, 5, 6, 7, 8, 9, and 10; Block—this variable holds a string of length BlockLen. The string is composed of letters from an input XTEN sequence and is determined by the position of the i counter; SubSeqList—this is a list that holds all of the generated subsequence scores.

[0064] FIG. 2 depicts the application of the algorithm SegScore to a hypothetical XTEN of 11 amino acids (SEQ ID NO: 787) in order to determine the repetitiveness. An XTEN sequence consisting of N amino acids is divided into N−S+1 subsequences of length S (S=3 in this case). A pair-wise comparison of all subsequences is performed and the average number of identical subsequences is calculated to result, in this case, in a subsequence score of 1.89.

[0065] FIGS. 3A-E illustrates the use of donor XTEN sequences to produce truncated XTEN sequences. FIG. 3A provides the sequence of AG864 (SEQ ID NO: 788), with the underlined sequence used to generate an AG576 (SEQ ID NO: 789) sequence. FIG. 3B provides the sequence of AG864 (SEQ ID NO: 790), with the underlined sequence used to generate an AG288 (SEQ ID NO: 791) sequence. FIG. 3C provides the sequence of AG864 (SEQ ID NO: 792), with the underlined sequence used to generate an AG144 (SEQ ID NO: 793) sequence. FIG. 3D provides the sequence of AE864 (SEQ ID NO: 794), with the underlined sequence used to generate an AE576 (SEQ ID NO: 795) sequence. FIG. 3E provides the sequence of AE864 (SEQ ID NO: 796), with the underlined sequence used to generate an AE288 (SEQ ID NO: 797) sequence.

[0066] FIG. 4 is a schematic flowchart of representative steps in the assembly, production and the evaluation of an XTEN.

[0067] FIG. 5 is a schematic flowchart of representative steps in the assembly of a GLP2-XTEN polynucleotide construct encoding a fusion protein. Individual oligonucleotides 501 are annealed into sequence motifs 502 such as a 12 amino acid motif (“12-mer”), which is ligated to additional sequence motifs from a library to create a pool that encompasses the desired length of the XTEN 504, as well as ligated to a smaller concentration of an oligo containing BbsI, and KpnI restriction sites 503. The resulting pool of ligation products is gel-purified and the band with the desired length of XTEN is cut, resulting in an isolated XTEN gene with a stopper sequence 505. The XTEN gene is cloned into a stuffer vector. In this case, the vector encodes an optional CBD sequence 506 and a GFP gene 508. Digestion is then performed with BbsI/HindIII to remove 507 and 508 and place the stop codon. The resulting product is then cloned into a BsaI/HindIII digested vector containing a gene encoding the GLP-2, resulting in gene 500 encoding a GLP2-XTEN fusion protein.

[0068] FIG. 6 is a schematic flowchart of representative steps in the assembly of a gene encoding fusion protein comprising a GLP-2 and XTEN, its expression and recovery as a fusion protein, and its evaluation as a candidate GLP2-XTEN product.

[0069] FIGS. 7A-H shows schematic representations of exemplary GLP2-XTEN fusion proteins (FIGS. 7A-H), all depicted in an N- to C-terminus orientation. FIG. 7A shows two different configurations of GLP2-XTEN fusion proteins (100), each comprising a single GLP-2 and an XTEN, the first of which has an XTEN molecule (102) attached to the C-terminus of a GLP-2 (103), and the second of which has an XTEN molecule attached to the N-terminus of a GLP-2 (103). FIG. 7B shows two different configurations of GLP2-XTEN fusion proteins (100), each comprising a single GLP-2, a spacer sequence and an XTEN, the first of which has an XTEN molecule (102) attached to the C-terminus of a spacer sequence (104) and the spacer sequence attached to the C-terminus of a GLP-2 (103) and the second of which has an XTEN molecule attached to the N-terminus of a spacer sequence (104) and the spacer sequence attached to the N-terminus of a GLP-2 (103). FIG. 7C shows two different configurations of GLP2-XTEN fusion proteins (101), each comprising two molecules of a single GLP-2 and one molecule of an XTEN, the first of which has an XTEN linked to the C-terminus of a first GLP-2 and that GLP-2 is linked to the C-terminus of a second GLP-2, and the second of which is in the opposite orientation in which the XTEN is linked to the N-terminus of a first GLP-2 and that GLP-2 is linked to the N-terminus of a second GLP-2. FIG. 7D shows two different configurations of GLP2-XTEN fusion proteins (101), each comprising two molecules of a single GLP-2, a spacer sequence and one molecule of an XTEN, the first of which has an XTEN linked to the C-terminus of a spacer sequence and the spacer sequence linked to the C-terminus of a first GLP-2 which is linked to the C-terminus of a second GLP-2, and the second of which is in the opposite orientation in which the XTEN is linked to the N-terminus of a spacer sequence and the spacer sequence is linked to the N-terminus of a first GLP-2 that that GLP-2 is linked to the N-terminus of a second GLP-2. FIG. 7E shows two different configurations of GLP2-XTEN fusion proteins (101), each comprising two molecules of a single GLP-2, a spacer sequence and one molecule of an XTEN, the first of which has an XTEN linked to the C-terminus of a first GLP-2 and the first GLP-2 linked to the C-terminus of a spacer sequence which is linked to the C-terminus of a second GLP-2 molecule, and the second of which is in the opposite configuration of XTEN linked to the N-terminus of a first GLP-2 which is linked to the N-terminus of a spacer sequence which in turn is linked to the N-terminus of a second molecule of GLP-2. FIG. 7F shows a configuration of GLP2-XTEN fusion protein (105), each comprising one molecule of GLP-2 and two molecules of an XTEN linked to the N-terminus and the C-terminus of the GLP-2. FIG. 7G shows a configuration (106) of a single GLP-2 linked to two XTEN, with the second XTEN separated from the GLP-2 by a spacer sequence. FIG. 7H shows a configuration (106) of a two GLP-2 linked to two XTEN, with the second XTEN linked to the C-terminus of the first GLP-2 and the N-terminus of the second GLP-2, which is at the C-terminus of the GLP2-XTEN.

[0070] FIGS. 8A-H is a schematic illustration of exemplary polynucleotide constructs (FIGS. 8A-H) of GLP2-XTEN genes that encode the corresponding GLP2-XTEN polypeptides of FIG. 7; all depicted in a 5′ to 3′ orientation. In these illustrative examples the genes encode GLP2-XTEN fusion proteins with one GLP-2 and XTEN (200); or one GLP-2, one spacer sequence and one XTEN (200); two GLP-2 and one XTEN (201); or two GLP-2, a spacer sequence and one XTEN (201); one GLP-2 and two XTEN (205); or two GLP-2 and two XTEN (206). In these depictions, the polynucleotides encode the following components: XTEN (202), GLP-2 (203), and spacer amino acids that can include a cleavage sequence (204), with all sequences linked in frame.

[0071] FIGS. 9A-D is a schematic representation of the design of GLP2-XTEN expression vectors with different processing strategies. FIG. 9A shows an exemplary expression vector encoding XTEN fused to the 3′ end of the sequence encoding GLP-2. Note that no additional leader sequences are required in this vector. FIG. 9B depicts an expression vector encoding XTEN fused to the 3′ end of the sequence encoding GLP-2 with a CBD leader sequence and a TEV protease site. FIG. 9C depicts an expression vector where the CBD and TEV processing site have been replaced with an optimized N-terminal leader sequence (NTS). FIG. 9D depicts an expression vector encoding an NTS sequence, an XTEN, a sequence encoding GLP-2, and then a second sequence encoding an XTEN.

[0072] FIG. 10 illustrates the process of combinatorial gene assembly of genes encoding XTEN. In this case, the genes are assembled from 6 base fragments and each fragment is available in 4 different codon versions (A, B, C and D). This allows for a theoretical diversity of 4096 in the assembly of a 12 amino acid motif.

[0073] FIGS. 11A-B shows characterization data of the fusion protein GLP2-2G_AE864. FIG. 11A is an SDS-PAGE gel of GLP2-2G-XTEN_AE864 lot AP690, as described in Example 16. The gels show lanes of molecular weight standards and 2 or 10 μg of reference standard, as indicated. FIG. 11B shows results of a size exclusion chromatography analysis of GLP2-2G-XTEN_AE864 lot AP690, as described in Example 16, compared to molecular weight standards of 667, 167, 44, 17, and 3.5 kDa.

[0074] FIG. 12 shows the ESI-MS analysis of GLP2-2G-XTEN_AE864 lot AP690, as described in Example 16, with a major peak at 83,142 Da, indicating full length intact GLP2-2G-XTEN, with an additional minor peak of 83,003 Da detected, representing the des-His GLP2-2G-XTEN at <5% of total protein.

[0075] FIG. 13 shows results of the GLP-2 receptor binding assay, as described in Example 17.

[0076] FIG. 14 shows the results of the pharmacokinetics of GLP2-2G-XTEN_AE864 in C57Bl/6 mice following subcutaneous (SC) administration. The samples were analyzed for fusion protein concentration, performed by both anti-XTEN/anti-XTEN sandwich ELISA and anti-GLP2/anti-XTEN sandwich ELISA, as described in Example 18, with results for both assays plotted.

[0077] FIG. 15 shows the results of the pharmacokinetics of GLP2-2G-XTEN_AE864 in Wistar rats following SC administration of two different dosage levels, performed by both anti-XTEN/anti-XTEN sandwich ELISA and anti-GLP2/anti-XTEN sandwich ELISA, as described in Example 19, with results for both assays plotted.

[0078] FIG. 16 shows the results of the pharmacokinetics of GLP2-2G-XTEN_AE864 in male cynomolgus monkeys following either subcutaneous (squares) or intravenous (triangles) administration of the fusion protein at a single dosage level (2 mg/kg). The samples were analyzed for fusion protein concentration, performed by anti-GLP2/anti-XTEN ELISA, as described in Example 20.

[0079] FIG. 17 shows the linear regression of the allometric scaling of GLP2-2G-XTEN half-life from three species used to predict a projected half-life of 240 hours in humans, as described in Example 20.

[0080] FIGS. 18A-B shows the results in rat small intestine weight and length from vehicle and treatment groups, as described in Example 21.

[0081] FIG. 19 shows the results of changes in body weight in a murine dextran sodium sulfate (DSS) model, with groups treated with vehicle, GLP2-2G peptide (no XTEN) or GLP2-2G-XTEN, as described in Example 21.

[0082] FIGS. 20A-D shows representative histopathology sections of the DSS model mice from vehicle ileum (FIG. 20A) and jejunum (FIG. 20B) and GLP2-2G-XTEN ileum (FIG. 20C) and jejunum (FIG. 20D), as described in Example 21.

[0083] FIGS. 21A-G shows results from Study 1 of a rat model of Crohn's Disease of indomethacin-induced intestinal inflammation, with groups treated with vehicle, GLP2-2G peptide (no XTEN) or GLP2-2G-XTEN and assayed, as described in Example 21. FIG. 21A shows results of the body weight at the termination of the experiment. FIG. 21B shows results of the length of the small intestines from each group. FIG. 21C shows results of the weight of the small intestines from each group. FIG. 21D shows results of the length of ulcerations and the percentage of ulceration in the small intestines from each group. FIG. 21E shows results of the scores of adhesions and transulceration in the small intestines from each group. FIG. 21F shows results of the length and percentage of inflammation of the small intestines from each group. FIG. 21G shows results of the TNFα assay of the small intestines from each group.

[0084] FIGS. 22A-B shows results from Study 2 of a rat model of Crohn's Disease of indomethacin-induced intestinal inflammation, with groups treated with vehicle, GLP2-2G peptide (no XTEN) or GLP2-2G-XTEN and assayed, as described in Example 21. FIG. 22A shows the Trans-Ulceration Score of the small intestines from each group. FIG. 22B shows the Adhesion Score of the small intestines from each group.

[0085] FIGS. 23A-D shows representative histopathology sections from Study 2 of the rat model of Crohn's Disease of indomethacin-induced intestinal inflammation from vehicle-no indomethicin (FIG. 23A), vehicle-indomethicin (FIG. 23B) and GLP2-2G-XTEN treatment groups (FIGS. 22C, D), as described in Example 21.

[0086] FIGS. 24A-C shows the results of small intestine length (FIG. 24A), villi height (FIG. 24B) and histopathology scoring (FIG. 24C) of mucosal atrophy, ulceration, infiltration measurements from diseased, vehicle-treated, GLP2-2G peptide-treated, and GLP2-2G-XTEN-treated rats, as described in Example 21. Asterisks indicate groups with statistically significant differences from vehicle (diseased) control group.

[0087] FIG. 25 shows results of a size exclusion chromatography analysis of glucagon-XTEN construct samples measured against protein standards of known molecular weight (as indicated), with the graph output as absorbance versus retention volume, as described in Example 25. The glucagon-XTEN constructs are 1) glucagon-Y288; 2) glucagonY-144; 3) glucagon-Y72; and 4) glucagon-Y36. The results indicate an increase in apparent molecular weight with increasing length of XTEN moiety.

[0088] FIG. 26 shows the pharmacokinetic profile (plasma concentrations) in cynomolgus monkeys after single doses of different compositions of GFP linked to unstructured polypeptides of varying length, administered either subcutaneously or intravenously, as described in Example 26. The compositions were GFP-L288, GFP-L576, GFP-XTEN_AF576, GFP-Y576 and XTEN_AD836-GFP. Blood samples were analyzed at various times after injection and the concentration of GFP in plasma was measured by ELISA using a polyclonal antibody against GFP for capture and a biotinylated preparation of the same polyclonal antibody for detection. Results are presented as the plasma concentration versus time (h) after dosing and show, in particular, a considerable increase in half-life for the XTEN_AD836-GFP, the composition with the longest sequence length of XTEN. The construct with the shortest sequence length, the GFP-L288 had the shortest half-life.

[0089] FIG. 27 shows an SDS-PAGE gel of samples from a stability study of the fusion protein of XTEN_AE864 fused to the N-terminus of GFP (see Example 27). The GFP-XTEN was incubated in cynomolgus plasma and rat kidney lysate for up to 7 days at 37° C. In addition, GFP-XTEN administered to cynomolgus monkeys was also assessed. Samples were withdrawn at 0, 1 and 7 days and analyzed by SDS PAGE followed by detection using Western analysis with antibodies against GFP.

[0090] FIG. 28 shows the amino acid sequence of GLP2-2G_AE864 (SEQ ID NO: 798).

### DETAILED DESCRIPTION OF THE INVENTION

[0091] Before the embodiments of the invention are described, it is to be understood that such embodiments are provided by way of example only, and that various alternatives to the embodiments of the invention described herein may be employed in practicing the invention. Numerous variations, changes, and substitutions will now occur to those skilled in the art without departing from the invention.

[0092] Unless otherwise defined, all technical and scientific terms used herein have the same meaning as commonly understood by one of ordinary skill in the art to which this invention belongs. Although methods and materials similar or equivalent to those described herein can be used in the practice or testing of the present invention, suitable methods and materials are described below. In case of conflict, the patent specification, including definitions, will control. In addition, the materials, methods, and examples are illustrative only and not intended to be limiting. Numerous variations, changes, and substitutions will now occur to those skilled in the art without departing from the invention.

### Definitions

[0093] In the context of the present application, the following terms have the meanings ascribed to them unless specified otherwise:

[0094] As used in the specification and claims, the singular forms “a”, “an” and “the” include plural references unless the context clearly dictates otherwise. For example, the term “a cell” includes a plurality of cells, including mixtures thereof.

[0095] The terms “polypeptide”, “peptide”, and “protein” are used interchangeably herein to refer to polymers of amino acids of any length. The polymer may be linear or branched, it may comprise modified amino acids, and it may be interrupted by non-amino acids. The terms also encompass an amino acid polymer that has been modified, for example, by disulfide bond formation, glycosylation, lipidation, acetylation, phosphorylation, or any other manipulation, such as conjugation with a labeling component.

[0096] As used herein, the term “amino acid” refers to either natural and/or unnatural or synthetic amino acids, including but not limited to both the D or L optical isomers, and amino acid analogs and peptidomimetics. Standard single or three letter codes are used to designate amino acids.

[0097] The term “natural L-amino acid” means the L optical isomer forms of glycine (G), proline (P), alanine (A), valine (V), leucine (L), isoleucine (I), methionine (M), cysteine (C), phenylalanine (F), tyrosine (Y), tryptophan (W), histidine (H), lysine (K), arginine (R), glutamine (Q), asparagine (N), glutamic acid (E), aspartic acid (D), serine (S), and threonine (T).

[0098] The term “non-naturally occurring,” as applied to sequences and as used herein, means polypeptide or polynucleotide sequences that do not have a counterpart to, are not complementary to, or do not have a high degree of homology with a wild-type or naturally-occurring sequence found in a mammal. For example, a non-naturally occurring polypeptide or fragment may share no more than 99%, 98%, 95%, 90%, 80%, 70%, 60%, 50% or even less amino acid sequence identity as compared to a natural sequence when suitably aligned.

[0099] The terms “hydrophilic” and “hydrophobic” refer to the degree of affinity that a substance has with water. A hydrophilic substance has a strong affinity for water, tending to dissolve in, mix with, or be wetted by water, while a hydrophobic substance substantially lacks affinity for water, tending to repel and not absorb water and tending not to dissolve in or mix with or be wetted by water Amino acids can be characterized based on their hydrophobicity. A number of scales have been developed. An example is a scale developed by Levitt, M, et al., J Mol Biol (1976) 104:59, which is listed in Hopp, T P, et al., Proc Natl Acad Sci USA (1981) 78:3824. Examples of “hydrophilic amino acids” are arginine, lysine, threonine, alanine, asparagine, and glutamine. Of particular interest are the hydrophilic amino acids aspartate, glutamate, and serine, and glycine. Examples of “hydrophobic amino acids” are tryptophan, tyrosine, phenylalanine, methionine, leucine, isoleucine, and valine.

[0100] A “fragment” when applied to a protein, is a truncated form of a native biologically active protein that retains at least a portion of the therapeutic and/or biological activity. A “variant” when applied to a protein, is a protein with sequence homology to the native biologically active protein that retains at least a portion of the therapeutic and/or biological activity of the biologically active protein. For example, a variant protein may share at least 70%, 75%, 80%, 85%, 90%, 95%, 96%, 97%, 98% or 99% amino acid sequence identity compared with the reference biologically active protein. As used herein, the term “biologically active protein moiety” includes proteins modified deliberately, as for example, by site directed mutagenesis, synthesis of the encoding gene, insertions, or accidentally through mutations.

[0101] The term “sequence variant” means polypeptides that have been modified compared to their native or original sequence by one or more amino acid insertions, deletions, or substitutions. Insertions may be located at either or both termini of the protein, and/or may be positioned within internal regions of the amino acid sequence. A non-limiting example would be insertion of an XTEN sequence within the sequence of the biologically-active payload protein. In deletion variants, one or more amino acid residues in a polypeptide as described herein are removed. Deletion variants, therefore, include all fragments of a payload polypeptide sequence. In substitution variants, one or more amino acid residues of a polypeptide are removed and replaced with alternative residues. In one aspect, the substitutions are conservative in nature and conservative substitutions of this type are well known in the art.

[0102] As used herein, “internal XTEN” refers to XTEN sequences that have been inserted into the sequence of the GLP-2. Internal XTENs can be constructed by insertion of an XTEN sequence into the sequence of GLP-2 by insertion between two adjacent amino acids or wherein XTEN replaces a partial, internal sequence of the GLP-2.

[0103] As used herein, “terminal XTEN” refers to XTEN sequences that have been fused to or in the N- or C-terminus of the GLP-2 or to a proteolytic cleavage sequence at the N- or C-terminus of the GLP-2. Terminal XTENs can be fused to the native termini of the GLP-2. Alternatively, terminal XTENs can replace a terminal sequence of the GLP-2.

[0104] The term “XTEN release site” refers to a cleavage sequence in GLP2-XTEN fusion proteins that can be recognized and cleaved by a mammalian protease, effecting release of an XTEN or a portion of an XTEN from the GLP2-XTEN fusion protein. As used herein, “mammalian protease” means a protease that normally exists in the body fluids, cells or tissues of a mammal XTEN release sites can be engineered to be cleaved by various mammalian proteases (a.k.a. “XTEN release proteases”) such as FXIa, FXIIa, kallikrein, FVIIIa, FVIIIa, FXa, FIIa (thrombin), Elastase-2, MMP-12, MMP13, MMP-17, MMP-20, or any protease that is present in the subject in proximity to the fusion protein. Other equivalent proteases (endogenous or exogenous) that are capable of recognizing a defined cleavage site can be utilized. The cleavage sites can be adjusted and tailored to the protease utilized.

[0105] The term “within”, when referring to a first polypeptide being linked to a second polypeptide, encompasses linking that connects the N-terminus of the first or second polypeptide to the C-terminus of the second or first polypeptide, respectively, as well as insertion of the first polypeptide into the sequence of the second polypeptide. For example, when an XTEN is linked “within” a GLP-2 polypeptide, the XTEN may be linked to the N-terminus, the C-terminus, or may be inserted between any two amino acids of the GLP-2 polypeptide.

[0106] “Activity” for the purposes herein refers to an action or effect of a component of a fusion protein consistent with that of the corresponding native biologically active protein component of the fusion protein, wherein “biological activity” refers to an in vitro or in vivo biological function or effect, including but not limited to receptor binding, antagonist activity, agonist activity, a cellular or physiologic response, or an effect generally known in the art for the payload GLP-2.

[0107] As used herein, the term “ELISA” refers to an enzyme-linked immunosorbent assay as described herein or as otherwise known in the art.

[0108] A “host cell” includes an individual cell or cell culture which can be or has been a recipient for the subject vectors. Host cells include progeny of a single host cell. The progeny may not necessarily be completely identical (in morphology or in genomic of total DNA complement) to the original parent cell due to natural, accidental, or deliberate mutation. A host cell includes cells transfected in vivo with a vector of this invention.

[0109] “Isolated,” when used to describe the various polypeptides disclosed herein, means polypeptide that has been identified and separated and/or recovered from a component of its natural environment. Contaminant components of its natural environment are materials that would typically interfere with diagnostic or therapeutic uses for the polypeptide, and may include enzymes, hormones, and other proteinaceous or non-proteinaceous solutes. As is apparent to those of skill in the art, a non-naturally occurring polynucleotide, peptide, polypeptide, protein, antibody, or fragments thereof, does not require “isolation” to distinguish it from its naturally occurring counterpart. In addition, a “concentrated”, “separated” or “diluted” polynucleotide, peptide, polypeptide, protein, antibody, or fragments thereof, is distinguishable from its naturally occurring counterpart in that the concentration or number of molecules per volume is generally greater than that of its naturally occurring counterpart. In general, a polypeptide made by recombinant means and expressed in a host cell is considered to be “isolated.”

[0110] An “isolated” nucleic acid is a nucleic acid molecule that is identified and separated from at least one contaminant nucleic acid molecule with which it is ordinarily associated in the natural source of the nucleic acid. For example, an isolated polypeptide-encoding nucleic acid molecule is other than in the form or setting in which it is found in nature. Isolated polypeptide-encoding nucleic acid molecules therefore are distinguished from the specific polypeptide-encoding nucleic acid molecule as it exists in natural cells. However, an isolated polypeptide-encoding nucleic acid molecule includes polypeptide-encoding nucleic acid molecules contained in cells that ordinarily express the polypeptide where, for example, the nucleic acid molecule is in a chromosomal or extra-chromosomal location different from that of natural cells.

[0111] A “chimeric” protein contains at least one fusion polypeptide comprising at least one region in a different position in the sequence than that which occurs in nature. The regions may normally exist in separate proteins and are brought together in the fusion polypeptide, or they may normally exist in the same protein but are placed in a new arrangement in the fusion polypeptide. A chimeric protein may be created, for example, by chemical synthesis, or by creating and translating a polynucleotide in which the peptide regions are encoded in the desired relationship.

[0112] “Conjugated”, “linked,” “fused,” and “fusion” are used interchangeably herein. These terms refer to the joining together of two or more chemical elements, sequences or components, by whatever means including chemical conjugation or recombinant means. For example, a promoter or enhancer is operably linked to a coding sequence if it affects the transcription of the sequence. Generally, “operably linked” means that the DNA sequences being linked are contiguous, and in reading phase or in-frame. An “in-frame fusion” refers to the joining of two or more open reading frames (ORFs) to form a continuous longer ORF, in a manner that maintains the correct reading frame of the original ORFs. Thus, the resulting recombinant fusion protein is a single protein containing two or more segments that correspond to polypeptides encoded by the original ORFs (which segments are not normally so joined in nature).

[0113] In the context of polypeptides, a “linear sequence” or a “sequence” is an order of amino acids in a polypeptide in an amino to carboxyl terminus direction in which residues that neighbor each other in the sequence are contiguous in the primary structure of the polypeptide. A “partial sequence” is a linear sequence of part of a polypeptide that is known to comprise additional residues in one or both directions.

[0114] “Heterologous” means derived from a genotypically distinct entity from the rest of the entity to which it is being compared. For example, a glycine rich sequence removed from its native coding sequence and operatively linked to a coding sequence other than the native sequence is a heterologous glycine rich sequence. The term “heterologous” as applied to a polynucleotide, a polypeptide, means that the polynucleotide or polypeptide is derived from a genotypically distinct entity from that of the rest of the entity to which it is being compared.

[0115] The terms “polynucleotides”, “nucleic acids”, “nucleotides” and “oligonucleotides” are used interchangeably. They refer to a polymeric form of nucleotides of any length, either deoxyribonucleotides or ribonucleotides, or analogs thereof. Polynucleotides may have any three-dimensional structure, and may perform any function, known or unknown. The following are non-limiting examples of polynucleotides: coding or non-coding regions of a gene or gene fragment, loci (locus) defined from linkage analysis, exons, introns, messenger RNA (mRNA), transfer RNA, ribosomal RNA, ribozymes, cDNA, recombinant polynucleotides, branched polynucleotides, plasmids, vectors, isolated DNA of any sequence, isolated RNA of any sequence, nucleic acid probes, and primers. A polynucleotide may comprise modified nucleotides, such as methylated nucleotides and nucleotide analogs. If present, modifications to the nucleotide structure may be imparted before or after assembly of the polymer. The sequence of nucleotides may be interrupted by non-nucleotide components. A polynucleotide may be further modified after polymerization, such as by conjugation with a labeling component.

[0116] The term “complement of a polynucleotide” denotes a polynucleotide molecule having a complementary base sequence and reverse orientation as compared to a reference sequence, such that it could hybridize with a reference sequence with complete fidelity.

[0117] “Recombinant” as applied to a polynucleotide means that the polynucleotide is the product of various combinations of recombination steps which may include cloning, restriction and/or ligation steps, and other procedures that result in an expression of a recombinant protein in a host cell.

[0118] The terms “gene” and “gene fragment” are used interchangeably herein. They refer to a polynucleotide containing at least one open reading frame that is capable of encoding a particular protein after being transcribed and translated. A gene or gene fragment may be genomic or cDNA, as long as the polynucleotide contains at least one open reading frame, which may cover the entire coding region or a segment thereof. A “fusion gene” is a gene composed of at least two heterologous polynucleotides that are linked together.

[0119] “Homology” or “homologous” or “sequence identity” refers to sequence similarity or interchangeability between two or more polynucleotide sequences or between two or more polypeptide sequences. When using a program such as BestFit to determine sequence identity, similarity or homology between two different amino acid sequences, the default settings may be used, or an appropriate scoring matrix, such as blosum45 or blosum80, may be selected to optimize identity, similarity or homology scores. Preferably, polynucleotides that are homologous are those which hybridize under stringent conditions as defined herein and have at least 70%, preferably at least 80%, more preferably at least 90%, more preferably 95%, more preferably 97%, more preferably 98%, and even more preferably 99% sequence identity compared to those sequences. Polypeptides that are homologous preferably have sequence identities that are at least 70%, preferably at least 80%, even more preferably at least 90%, even more preferably at least 95-99%, and most preferably 100% identical.

[0120] “Ligation” refers to the process of forming phosphodiester bonds between two nucleic acid fragments or genes, linking them together. To ligate the DNA fragments or genes together, the ends of the DNA must be compatible with each other. In some cases, the ends will be directly compatible after endonuclease digestion. However, it may be necessary to first convert the staggered ends commonly produced after endonuclease digestion to blunt ends to make them compatible for ligation.

[0121] The terms “stringent conditions” or “stringent hybridization conditions” includes reference to conditions under which a polynucleotide will hybridize to its target sequence, to a detectably greater degree than other sequences (e.g., at least 2-fold over background). Generally, stringency of hybridization is expressed, in part, with reference to the temperature and salt concentration under which the wash step is carried out. Typically, stringent conditions will be those in which the salt concentration is less than about 1.5 M Na ion, typically about 0.01 to 1.0 M Na ion concentration (or other salts) at pH 7.0 to 8.3 and the temperature is at least about 30° C. for short polynucleotides (e.g., 10 to 50 nucleotides) and at least about 60° C. for long polynucleotides (e.g., greater than 50 nucleotides)—for example, “stringent conditions” can include hybridization in 50% formamide, 1 M NaCl, 1% SDS at 37° C., and three washes for 15 min each in 0.1×SSC/1% SDS at 60° C. to 65° C. Alternatively, temperatures of about 65° C., 60° C., 55° C., or 42° C. may be used. SSC concentration may be varied from about 0.1 to 2×SSC, with SDS being present at about 0.1%. Such wash temperatures are typically selected to be about 5° C. to 20° C. lower than the thermal melting point for the specific sequence at a defined ionic strength and pH. The Tm is the temperature (under defined ionic strength and pH) at which 50% of the target sequence hybridizes to a perfectly matched probe. An equation for calculating Tm and conditions for nucleic acid hybridization are well known and can be found in Sambrook, J. et al., “Molecular Cloning: A Laboratory Manual,” 3′ edition, Cold Spring Harbor Laboratory Press, 2001. Typically, blocking reagents are used to block non-specific hybridization. Such blocking reagents include, for instance, sheared and denatured salmon sperm DNA at about 100-200 μg/ml. Organic solvent, such as formamide at a concentration of about 35-50% v/v, may also be used under particular circumstances, such as for RNA:DNA hybridizations. Useful variations on these wash conditions will be readily apparent to those of ordinary skill in the art.

[0122] The terms “percent identity, “percentage of sequence identity,” and “% identity,” as applied to polynucleotide sequences, refer to the percentage of residue matches between at least two polynucleotide sequences aligned using a standardized algorithm. Such an algorithm may insert, in a standardized and reproducible way, gaps in the sequences being compared in order to optimize alignment between two sequences, and therefore achieve a more meaningful comparison of the two sequences. Percent identity may be measured over the length of an entire defined polynucleotide sequence, or may be measured over a shorter length, for example, over the length of a fragment taken from a larger, defined polynucleotide sequence, for instance, a fragment of at least 45, at least 60, at least 90, at least 120, at least 150, at least 210 or at least 450 contiguous residues. Such lengths are exemplary only, and it is understood that any fragment length supported by the sequences shown herein, in the tables, figures or Sequence Listing, may be used to describe a length over which percentage identity may be measured. The percentage of sequence identity is calculated by comparing two optimally aligned sequences over the window of comparison, determining the number of matched positions (at which identical residues occur in both polypeptide sequences), dividing the number of matched positions by the total number of positions in the window of comparison (i.e., the window size), and multiplying the result by 100 to yield the percentage of sequence identity. When sequences of different length are to be compared, the shortest sequence defines the length of the window of comparison. Conservative substitutions are not considered when calculating sequence identity.

[0123] “Percent (%) sequence identity,” with respect to the polypeptide sequences identified herein, is defined as the percentage of amino acid residues in a query sequence that are identical with the amino acid residues of a second, reference polypeptide sequence or a portion thereof, after aligning the sequences and introducing gaps, if necessary, to achieve the maximum percent sequence identity, and not considering any conservative substitutions as part of the sequence identity, thereby resulting in optimal alignment. Alignment for purposes of determining percent amino acid sequence identity can be achieved in various ways that are within the skill in the art, for instance, using publicly available computer software such as BLAST, BLAST-2, ALIGN or Megalign (DNASTAR) software. Those skilled in the art can determine appropriate parameters for measuring alignment, including any algorithms needed to achieve optimal alignment over the full length of the sequences being compared. Percent identity may be measured over the length of an entire defined polypeptide sequence, or may be measured over a shorter length, for example, over the length of a fragment taken from a larger, defined polypeptide sequence, for instance, a fragment of at least 15, at least 20, at least 30, at least 40, at least 50, at least 70 or at least 150 contiguous residues. Such lengths are exemplary only, and it is understood that any fragment length supported by the sequences shown herein, in the tables, figures or Sequence Listing, may be used to describe a length over which percentage identity may be measured.

[0124] “Repetitiveness” used in the context of polynucleotide sequences refers to the degree of internal homology in the sequence such as, for example, the frequency of identical nucleotide sequences of a given length. Repetitiveness can, for example, be measured by analyzing the frequency of identical sequences.

[0125] A “vector” is a nucleic acid molecule, preferably self-replicating in an appropriate host, which transfers an inserted nucleic acid molecule into and/or between host cells. The term includes vectors that function primarily for insertion of DNA or RNA into a cell, replication of vectors that function primarily for the replication of DNA or RNA, and expression vectors that function for transcription and/or translation of the DNA or RNA. Also included are vectors that provide more than one of the above functions. An “expression vector” is a polynucleotide which, when introduced into an appropriate host cell, can be transcribed and translated into a polypeptide(s). An “expression system” usually connotes a suitable host cell comprised of an expression vector that can function to yield a desired expression product.

[0126] “Serum degradation resistance,” as applied to a polypeptide, refers to the ability of the polypeptides to withstand degradation in blood or components thereof, which typically involves proteases in the serum or plasma. The serum degradation resistance can be measured by combining the protein with human (or mouse, rat, monkey, as appropriate) serum or plasma, typically for a range of days (e.g. 0.25, 0.5, 1, 2, 4, 8, 16 days), typically at about 37° C. The samples for these time points can be run on a Western blot assay and the protein is detected with an antibody. The antibody can be to a tag in the protein. If the protein shows a single band on the western, where the protein's size is identical to that of the injected protein, then no degradation has occurred. In this exemplary method, the time point where 50% of the protein is degraded, as judged by Western blots or equivalent techniques, is the serum degradation half-life or “serum half-life” of the protein.

[0127] The terms “t_{1/2}”, “terminal half-life”, “elimination half-life” and “circulating half-life” are used interchangeably herein and, as used herein mean the terminal half-life calculated as ln(2)/Kₑₗ. Kₑₗ is the terminal elimination rate constant calculated by linear regression of the terminal linear portion of the log concentration vs. time curve. Half-life typically refers to the time required for half the quantity of an administered substance deposited in a living organism to be metabolized or eliminated by normal biological processes.

[0128] “Active clearance” means the mechanisms by which a protein is removed from the circulation other than by filtration, and which includes removal from the circulation mediated by cells, receptors, metabolism, or degradation of the protein.

[0129] “Apparent molecular weight factor” and “apparent molecular weight” are related terms referring to a measure of the relative increase or decrease in apparent molecular weight exhibited by a particular amino acid or polypeptide sequence. The apparent molecular weight is determined using size exclusion chromatography (SEC) or similar methods by comparing to globular protein standards and is measured in “apparent kDa” units. The apparent molecular weight factor is the ratio between the apparent molecular weight and the actual molecular weight; the latter predicted by adding, based on amino acid composition, the calculated molecular weight of each type of amino acid in the composition or by estimation from comparison to molecular weight standards in an SDS electrophoresis gel. Determination of both the apparent molecular weight and apparent molecular weight factor for representative proteins is described in the Examples.

[0130] The terms “hydrodynamic radius” or “Stokes radius” is the effective radius (Rh in nm) of a molecule in a solution measured by assuming that it is a body moving through the solution and resisted by the solution's viscosity. In the embodiments of the invention, the hydrodynamic radius measurements of the XTEN fusion proteins correlate with the ‘apparent molecular weight factor’, which is a more intuitive measure. The “hydrodynamic radius” of a protein affects its rate of diffusion in aqueous solution as well as its ability to migrate in gels of macromolecules. The hydrodynamic radius of a protein is determined by its molecular weight as well as by its structure, including shape and compactness. Methods for determining the hydrodynamic radius are well known in the art, such as by the use of size exclusion chromatography (SEC), as described in U.S. Pat. Nos. 6,406,632 and 7,294,513. Most proteins have globular structure, which is the most compact three-dimensional structure a protein can have with the smallest hydrodynamic radius. Some proteins adopt a random and open, unstructured, or ‘linear’ conformation and as a result have a much larger hydrodynamic radius compared to typical globular proteins of similar molecular weight.

[0131] “Physiological conditions” refers to a set of conditions in a living host as well as in vitro conditions, including temperature, salt concentration, pH, that mimic those conditions of a living subject. A host of physiologically relevant conditions for use in in vitro assays have been established. Generally, a physiological buffer contains a physiological concentration of salt and is adjusted to a neutral pH ranging from about 6.5 to about 7.8, and preferably from about 7.0 to about 7.5. A variety of physiological buffers are listed in Sambrook et al. (2001). Physiologically relevant temperature ranges from about 25° C. to about 38° C., and preferably from about 35° C. to about 37° C.

[0132] A “reactive group” is a chemical structure that can be coupled to a second reactive group. Examples for reactive groups are amino groups, carboxyl groups, sulfhydryl groups, hydroxyl groups, aldehyde groups, azide groups. Some reactive groups can be activated to facilitate coupling with a second reactive group. Non-limiting examples for activation are the reaction of a carboxyl group with carbodiimide, the conversion of a carboxyl group into an activated ester, or the conversion of a carboxyl group into an azide function.

[0133] “Controlled release agent”, “slow release agent”, “depot formulation” and “sustained release agent” are used interchangeably to refer to an agent capable of extending the duration of release of a polypeptide of the invention relative to the duration of release when the polypeptide is administered in the absence of agent. Different embodiments of the present invention may have different release rates, resulting in different therapeutic amounts.

[0134] The terms “antigen”, “target antigen” and “immunogen” are used interchangeably herein to refer to the structure or binding determinant that an antibody fragment or an antibody fragment-based therapeutic binds to or has specificity against.

[0135] The term “payload” as used herein refers to a protein or peptide sequence that has biological or therapeutic activity; the counterpart to the pharmacophore of small molecules. Examples of payloads include, but are not limited to, cytokines, enzymes, hormones, blood coagulation factors, and growth factors. Payloads can further comprise genetically fused or chemically conjugated moieties such as chemotherapeutic agents, antiviral compounds, toxins, or contrast agents. These conjugated moieties can be joined to the rest of the polypeptide via a linker that may be cleavable or non-cleavable.

[0136] The term “antagonist”, as used herein, includes any molecule that partially or fully blocks, inhibits, or neutralizes a biological activity of a native polypeptide disclosed herein. Methods for identifying antagonists of a polypeptide may comprise contacting a native polypeptide with a candidate antagonist molecule and measuring a detectable change in one or more biological activities normally associated with the native polypeptide. In the context of the present invention, antagonists may include proteins, nucleic acids, carbohydrates, antibodies or any other molecules that decrease the effect of a biologically active protein.

[0137] The term “agonist” is used in the broadest sense and includes any molecule that mimics a biological activity of a native polypeptide disclosed herein. Suitable agonist molecules specifically include agonist antibodies or antibody fragments, fragments or amino acid sequence variants of native polypeptides, peptides, small organic molecules, etc. Methods for identifying agonists of a native polypeptide may comprise contacting a native polypeptide with a candidate agonist molecule and measuring a detectable change in one or more biological activities normally associated with the native polypeptide.

[0138] “Inhibition constant”, or “Kᵢ”, are used interchangeably and mean the dissociation constant of the enzyme-inhibitor complex, or the reciprocal of the binding affinity of the inhibitor to the enzyme.

[0139] As used herein, “treat” or “treating,” or “palliating” or “ameliorating” are used interchangeably and mean administering a drug or a biologic to achieve a therapeutic benefit, to cure or reduce the severity of an existing condition, or to achieve a prophylactic benefit, prevent or reduce the likelihood of onset or severity the occurrence of a condition. By therapeutic benefit is meant eradication or amelioration of the underlying condition being treated or one or more of the physiological symptoms associated with the underlying condition such that an improvement is observed in the subject, notwithstanding that the subject may still be afflicted with the underlying condition.

[0140] A “therapeutic effect” or “therapeutic benefit,” as used herein, refers to a physiologic effect, including but not limited to the mitigation, amelioration, or prevention of disease in humans or other animals, or to otherwise enhance physical or mental wellbeing of humans or animals, resulting from administration of a fusion protein of the invention other than the ability to induce the production of an antibody against an antigenic epitope possessed by the biologically active protein. For prophylactic benefit, the compositions may be administered to a subject at risk of developing a particular condition, or to a subject reporting one or more of the physiological symptoms of a condition, even though a diagnosis (e.g., Crohn's Disease) may not have been made.

[0141] The terms “therapeutically effective amount” and “therapeutically effective dose”, as used herein, refer to an amount of a drug or a biologically active protein, either alone or as a part of a fusion protein composition, that is capable of having any detectable, beneficial effect on any symptom, aspect, measured parameter or characteristics of a disease state or condition when administered in one or repeated doses to a subject. Such effect need not be absolute to be beneficial. Determination of a therapeutically effective amount is well within the capability of those skilled in the art, especially in light of the detailed disclosure provided herein.

[0142] The term “therapeutically effective dose regimen”, as used herein, refers to a schedule for consecutively administered multiple doses (i.e., at least two or more) of a biologically active protein, either alone or as a part of a fusion protein composition, wherein the doses are given in therapeutically effective amounts to result in sustained beneficial effect on any symptom, aspect, measured parameter or characteristics of a disease state or condition.

### I). General Techniques

[0143] The practice of the present invention employs, unless otherwise indicated, conventional techniques of immunology, biochemistry, chemistry, molecular biology, microbiology, cell biology, genomics and recombinant DNA, which are within the skill of the art. See Sambrook, J. et al., “Molecular Cloning: A Laboratory Manual,” 3^{rd} edition, Cold Spring Harbor Laboratory Press, 2001; “Current protocols in molecular biology”, F. M. Ausubel, et al. eds., 1987; the series “Methods in Enzymology,” Academic Press, San Diego, Calif.; “PCR 2: a practical approach”, M. J. MacPherson, B. D. Hames and G. R. Taylor eds., Oxford University Press, 1995; “Antibodies, a laboratory manual” Harlow, E. and Lane, D. eds., Cold Spring Harbor Laboratory, 1988; “Goodman & Gilman's The Pharmacological Basis of Therapeutics,” 11^{th} Edition, McGraw-Hill, 2005; and Freshney, R. I., “Culture of Animal Cells: A Manual of Basic Technique,” 4^{th} edition, John Wiley & Sons, Somerset, N J, 2000, the contents of which are incorporated in their entirety herein by reference.

### II). Glucagon-Like-2 Protein

[0144] The present invention relates, in part, to fusion protein compositions comprising GLP-2 and one or more extended recombinant polypeptide (XTEN), resulting in GLP2-XTEN fusion protein compositions.

[0145] “Glucagon-like protein-2” or “GLP-2” means, collectively herein, human glucagon like peptide-2, species homologs of human GLP-2, and non-natural sequence variants having at least a portion of the biological activity of mature GLP-2 including variants such as, but not limited to, a variant with glycine substituted for alanine at position 2 of the mature sequence (“2G”) as well as Val, Glu, Lys, Arg, Leu or Ile substituted for alanine at position 2. GLP-2 or sequence variants have been isolated, synthesized, characterized, or cloned, as described in U.S. Pat. Nos. 5,789,379; 5,834,428; 5,990,077; 5,994,500; 6,184,201; 7,186,683; 7,563,770; 20020025933; and 20030162703.

[0146] Human GLP-2 is a 33 amino acid peptide, co-secreted along with GLP-1 from intestinal endocrine cells in the epithelium of the small and large intestine. The 180 amino-acid product of the proglucagon gene is post-translationally processed in a tissue-specific manner in pancreatic A cells and intestinal L cells into the 33 amino acid GLP-2 (Orskov et al., FEBS Lett. (1989) 247: 193-196; Hartmann et al., Peptides (2000) 21: 73-80). In pancreatic A cells, the major bioactive hormone is glucagon cleaved by PCSK2/PC2. In the intestinal L cells PCSK1/PC1 liberates GLP-1, GLP-2, glicentin and oxyntomodulin. GLP-2 functions as a pleiotropic intestinotrophic hormone with wide-ranging effects that include the promotion of mucosal growth and nutrient absorption, intestinal homeostasis, regulation of gastric motility, gastric acid secretion and intestinal hexose transport, reduction of intestinal permeability and increase in mesenteric blood flow (Estall J L, Drucker D J (2006) Glucagon-like peptide-2. Annual Rev Nutr26:391-411), (Guan X, et al. (2006) GLP-2 receptor localizes to enteric neurons and endocrine cells expressing vasoactive peptides and mediates increased blood flow. Gastroenterology 130:150-164; Stephens J, et al. (2006) Glucagon-like peptide-2 acutely increases proximal small intestinal blood flow in TPN-fed neonatal piglets. Am J Physiol Regul Integr Comp Physiol 290:R283-R289; Nelson D W, et al. (2007) Localization and activation of GLP-2 receptors on vagal afferents in the rat. Endocrinology 148:1954-1962). The effects mediated by GLP-2 are triggered by the binding and activation of the GLP-2 receptor, a member of the glucagon/secretin G protein-coupled receptor superfamily that is located on enteric (Bjerknes M, Cheng H (2001) Modulation of specific intestinal epithelial progenitors by enteric neurons. Proc Natl Acad Sci USA 98:12497-12502) and vagal (Nelson et al., 2007) nerves, subepithelial myofibroblasts (Orskov C, et al. (2005) GLP-2 stimulates colonic growth via KGF, released by subepithelial myofibroblasts with GLP-2 receptors. Regul Pept 124:105-11), and a subset of intestinal epithelial cells (Thulesen J, et al. (2000) Potential targets for glucagon-like peptide 2 (GLP-2) in the rat: distribution and binding of i.v. injected (125) I-GLP-2. Peptides 21:1511-1517). In addition, GLP-2 has an important role in intestinal adaptation, repair and protection during inflammatory events, including amelioration of the effects of proinflammatory cytokines (Sigalet D L, et al. (2007) Enteric neural pathways mediate the anti-inflammatory actions of glucagon-like peptide 2. Am J Physiol Gastrointest Liver Physiol 293:G211-G221). GLP-2 also enhances nutrient absorption and gut adaptation in rodents or humans with short bowel syndrome (SBS) (Jeppesen et al., (2001) Gastroenterology 120: 806-815).

[0147] In one aspect, the invention contemplates inclusion of GLP-2 sequences in the GLP2-XTEN fusion protein compositions that are identical to human GLP-2, sequences that have homology to GLP-2 sequences, sequences that are natural, such as from humans, non-human primates, mammals (including domestic animals) that retain at least a portion of the biologic activity or biological function of native human GLP-2. In one embodiment, the GLP-2 is a non-natural GLP-2 sequence variant, fragment, or a mimetic of a natural sequence that retains at least a portion of the biological activity of the corresponding native GLP-2, such as but not limited to the substitution of the alanine at position 2 of the mature GLP-2 peptide sequence with glycine (“GLP-2-2G”). In another embodiment, the GLP-2 of the fusion protein has the sequence HGDGSFSDEMNTILDNLAARDFINWLIQTKITD (SEQ ID NO: 1). Sequences with homology to GLP-2 may be found by standard homology searching techniques, such as NCBI BLAST, or in public databases such as Chemical Abstracts Services Databases (e.g., the CAS Registry), GenBank, The Universal Protein Resource (UniProt) and subscription provided databases such as GenSeq (e.g., Derwent).

[0148] Table 1 provides a non-limiting list of amino acid sequences of GLP-2 that are encompassed by the GLP2-XTEN fusion proteins of the invention. Any of the GLP-2 sequences or homologous derivatives to be incorporated into the fusion protein compositions can be constructed by shuffling individual mutations into and between the amino acids of the sequences of Table 1 or by replacing the amino acids of the sequences of Table 1. The resulting GLP-2 sequences can be evaluated for activity and those that retain at least a portion of the biological activity of the native GLP-2 may be useful for inclusion in the fusion protein compositions of this invention. In some embodiments, GLP-2 that can be incorporated into a GLP2-XTEN include proteins that have at least about 80% sequence identity, or alternatively 81%, 82%, 83%, 84%, 85%, 86%, 87%, 88%, 89%, 90%, 91%, 92%, 93%, 94%, 95%, 96%, 97%, 98%, 99%, or 100% sequence identity compared to an amino acid sequence selected from Table 1.

TABLE 1
GLP-2 amino acid sequences

| | | SEQ ID |
|---|---|---|
| Name (source) | Amino Acid Sequence | NO: |
| GLP-2 (human) | HADGSFSDEMNTILDNLAARDFINWLIQTKITD | 2 |
| GLP-2 variant 1 SEQ ID NO: 3 U.S. Pat. | HADGSFSDEMNTILDNLATRDFINWLIQTKITD | 3 |
| No. 7,186,683 | | |
| GLP-2 variant 2 SEQ ID NO: 5 U.S. Pat. | HGDGSFSDEMNTILDNLAARDFINWLIQTKITD | 1 |
| No. 5,789,379 | | |
| GLP-2 variant 3 | HVDGSFSDEMNTILDNLAARDFINWLIQTKITD | 4 |
| GLP-2 variant 4 | HEDGSFSDEMNTILDNLAARDFINWLIQTKITD | 5 |
| GLP-2 variant 5 | HKDGSFSDEMNTILDNLAARDFINWLIQTKITD | 6 |
| GLP-2 variant 6 | HRDGSFSDEMNTILDNLAARDFINWLIQTKITD | 7 |
| GLP-2 variant 7 | HLDGSFSDEMNTILDNLAARDFINWLIQTKITD | 8 |
| GLP-2 variant 8 | HIDGSFSDEMNTILDNLAARDFINWLIQTKITD | 9 |
| GLP-2 (mouse) | HADGSFSDEMSTILDNLATRDFINWLIQTKITD | 10 |
| GLP-2 (rat) | HADGSFSDEMNTILDNLATRDFINWLIQTKITD | 11 |
| GLP-2 (bovine) | HADGSFSDEMNTVLDSLATRDFINWLLQTKITD | 12 |
| GLP-2 (bovine variant) | HGDGSFSDEMNTVLDSLATRDFINWLLQTKITD | 13 |
| GLP-2 (pig) | HADGSFSDEMNTVLDNLATRDFINWLLHTKITDS | 14 |
| | L | |
| GLP-2 (pig variant) | HGDGSFSDEMNTVLDNLATRDFINWLLHTKITDS | 15 |
| | L | |
| GLP-2 (sheep) | HADGSFSDEMNTVLDSLATRDFINWLLQTKI | 16 |
| GLP-2 (sheep variant) | HGDGSFSDEMNTVLDSLATRDFINWLLQTKI | 17 |
| GLP-2 (canine) | HADGSFSDEMNTVLDTLATRDFINWLLQTKITD | 18 |
| GLP-2 (canine variant) | HGDGSFSDEMNTVLDTLATRDFINWLLQTKITD | 19 |
| GLP-2 (chicken) | HADGTFTSDINKILDDMAAKEFLKWLINTKVTQ | 20 |
| GLP-2 (chicken variant) | HGDGTFTSDINKILDDMAAKEFLKWLINTKVTQ | 21 |
| GLP-2 (turkey) | HADGTFTSDINKILDDMAAKEFLKWLINTKVTQ | 22 |
| GLP-2 (turkey variant) | HGDGTFTSDINKILDDMAAKEFLKWLINTKVTQ | 23 |
| GLP-2 (Xenopus laevis) | HADGSFTNDINKVLDIIAAQEFLDWVINTQETE | 24 |

[0149] The GLP-2 of the subject compositions are not limited to native, full-length GLP-2 polypeptides, but also include recombinant versions as well as biologically and/or pharmacologically active forms with sequence variants, or fragments thereof. For example, it will be appreciated that various amino acid deletions, insertions and substitutions can be made in the GLP-2 to create variants that exhibit one or more biological activity or pharmacologic properties of the wild-type GLP-2. Examples of conservative substitutions for amino acids in polypeptide sequences are shown in Table 2. In embodiments of the GLP2-XTEN in which the sequence identity of the GLP-2 is less than 100% compared to a specific sequence disclosed herein, the invention contemplates substitution of any of the other 19 natural L-amino acids for a given amino acid residue of a given GLP-2, which may be at any position within the sequence of the GLP-2, including adjacent amino acid residues. In some embodiments, the GLP-2 variant incorporated into the GLP2-XTEN has glycine (G), valine (V), glutamate (E), lysine (K), arginine (R), leucine (K) or isoleucine (I) substituted for alanine (A) at position 2 of the mature peptide. Such substitution may confer resistance to dipeptidyl peptidase-4 (DPP-4). In one embodiment, glycine is substituted for alanine at position 2 of the GLP-2 sequence. If any one substitution results in an undesirable change in biological activity, then one of the alternative amino acids can be employed and the construct protein evaluated by the methods described herein (e.g., the assays of Table 32), or using any of the techniques and guidelines for conservative and non-conservative mutations set forth, for instance, in U.S. Pat. No. 5,364,934 (the content of which is incorporated by reference in its entirety), or using methods generally known in the art. In addition, variants can include, for instance, polypeptides wherein one or more amino acid residues are added or deleted at the N- or C-terminus of the full-length native amino acid sequence of a GLP-2 that retains some if not all of the biological activity of the native peptide; e.g., the ability to bind GLP-2 receptor and/or the ability to activate GLP-2 receptor.

TABLE 2
Exemplary conservative amino acid substitutions

| Original Residue | Exemplary Substitutions |
|---|---|
| Ala (A) | val; leu; ile |
| Arg (R) | lys; gln; asn |
| Asn (N) | gin; his; lys; arg |
| Asp (D) | Glu |
| Cys (C) | Ser |
| Gln (Q) | Asn |
| Glu (E) | Asp |
| Gly (G) | Pro |
| His (H) | asn: gin: lys: arg |
| Ile (I) | leu; val; met; ala; phe: norleucine |
| Leu (L) | norleucine: ile: val; met; ala: phe |
| Lys (K) | arg: gin: asn |
| Met (M) | leu; phe; ile |
| Phe (F) | leu: val: ile; ala |
| Pro (P) | Gly |
| Ser (S) | Thr |
| Thr (T) | Ser |
| Trp (W) | Tyr |
| Tyr(Y) | Trp: phe: thr: ser |
| Val (V) | Ile; leu; met; phe; ala; norleucine |

[0150] Sequence variants of GLP-2, whether exhibiting substantially the same or better biological activity than a corresponding wild-type GLP-2, or, alternatively, exhibiting substantially modified or reduced biological activity relative to wild-type GLP-2, include, without limitation, polypeptides having an amino acid sequence that differs from the sequence of wild-type GLP-2 by insertion, deletion, or substitution of one or more amino acids. Such GLP-2 variants are known in the art, including those described in U.S. Pat. Nos. 7,186,683 or 5,789,379, 5,994,500, all of which are incorporated herein by reference.

### III). Extended Recombinant Polypeptides

[0151] In one aspect, the invention provides XTEN polypeptide compositions that are useful as fusion protein partner(s) to link to and/or incorporate within a GLP-2 sequence, resulting in a GLP2-XTEN fusion protein. XTEN are generally polypeptides with non-naturally occurring, substantially non-repetitive sequences having a low degree of or no secondary or tertiary structure under physiologic conditions. XTEN typically have from about 36 to about 3000 amino acids of which the majority or the entirety are small hydrophilic amino acids. As used herein, “XTEN” specifically excludes whole antibodies or antibody fragments (e.g. single-chain antibodies and Fc fragments). XTENs have utility as a fusion protein partners in that they serve in various roles, conferring certain desirable pharmacokinetic, physicochemical and pharmaceutical properties when linked to a GLP-2 protein to a create a GLP2-XTEN fusion protein. Such GLP2-XTEN fusion protein compositions have enhanced properties compared to the corresponding GLP-2 not linked to XTEN, making them useful in the treatment of certain gastrointestinal conditions, as more fully described below.

[0152] The selection criteria for the XTEN to be fused to the biologically active proteins generally relate to attributes of physicochemical properties and conformational structure of the XTEN that is, in turn, used to confer the enhanced properties to the fusion proteins compositions. The unstructured characteristic and physical/chemical properties of the XTEN result, in part, from the overall amino acid composition disproportionately limited to 4-6 hydrophilic amino acids, the linking of the amino acids in a quantifiable non-repetitive design, and the length of the XTEN polypeptide. In an advantageous feature common to XTEN but uncommon to polypeptides, the properties of XTEN disclosed herein are not tied to absolute primary amino acid sequences, as evidenced by the diversity of the exemplary sequences of Table 4 that, within varying ranges of length, possess similar properties, many of which are documented in the Examples. The XTEN of the present invention exhibits one or more of the following advantageous properties: conformational flexibility, reduced or lack of secondary structure, high degree of aqueous solubility, high degree of protease resistance, low immunogenicity, low binding to mammalian receptors, a defined degree of charge, and increased hydrodynamic (or Stokes) radii; properties that make them particularly useful as fusion protein partners. In turn, non-limiting examples of the enhanced properties of the fusion proteins comprising GLP-2 fused to the XTEN include increases in the overall solubility and/or metabolic stability, reduced susceptibility to proteolysis, reduced immunogenicity, reduced rate of absorption when administered subcutaneously or intramuscularly, reduced clearance by the kidney, enhanced interactions with substrate, and enhanced pharmacokinetic properties. Enhanced pharmacokinetic properties of the inventive GLP2-XTEN compositions include longer terminal half-life (e.g., two-fold, three-fold, four-fold or more), increased area under the curve (AUC) (e.g., 25%, 50%, 100% or more), lower volume of distribution, slower absorption after subcutaneous or intramuscular injection (compared to GLP-2 not linked to the XTEN and administered by a similar route) such that the Cₘₐₓ is lower, which, in turn, results in reductions in adverse effects of the GLP-2 that, collectively, results in an increased period of time that a fusion protein of a GLP2-XTEN composition administered to a subject provides therapeutic activity. In some embodiments, the GLP2-XTEN compositions comprise cleavage sequences (described more fully, below) that permits sustained release of biologically active GLP-2.A GLP2-XTEN having such cleavage sequence can act as a depot when subcutaneously or intramuscularly administered. It is specifically contemplated that the subject GLP2-XTEN fusion proteins of the disclosure can exhibit one or more or any combination of the improved properties disclosed herein. In some embodiments, GLP2-XTEN compositions permit less frequent dosing compared to GLP-2 not linked to the XTEN and administered in a comparable fashion. Such GLP2-XTEN fusion protein compositions have utility to treat certain GLP-2-related diseases, disorders or conditions, as described herein.

[0153] A variety of methods and assays are known in the art for determining the physicochemical properties of proteins such as the compositions comprising the inventive XTEN. Such properties include but are not limited to secondary or tertiary structure, solubility, protein aggregation, melting properties, contamination and water content. Such methods include analytical centrifugation, EPR, HPLC-ion exchange, HPLC-size exclusion chromatography (SEC), HPLC-reverse phase, light scattering, capillary electrophoresis, circular dichroism, differential scanning calorimetry, fluorescence, HPLC-ion exchange, IR, NMR, Raman spectroscopy, refractometry, and UV/Visible spectroscopy. Additional methods are disclosed in Arnau, et al., Prot Expr and Purif (2006) 48, 1-13.

[0154] The XTEN component(s) of the GLP2-XTEN are designed to behave like denatured peptide sequences under physiological conditions, despite the extended length of the polymer. “Denatured” describes the state of a peptide in solution that is characterized by a large conformational freedom of the peptide backbone. Most peptides and proteins adopt a denatured conformation in the presence of high concentrations of denaturants or at elevated temperature. Peptides in denatured conformation have, for example, characteristic circular dichroism (CD) spectra and are characterized by a lack of long-range interactions as determined by NMR. “Denatured conformation” and “unstructured conformation” are used synonymously herein. In some embodiments, the invention provides XTEN sequences that, under physiologic conditions, resemble denatured sequences that are largely devoid in secondary structure. In other cases, the XTEN sequences are substantially devoid of secondary structure under physiologic conditions. “Largely devoid,” as used in this context, means that less than 50% of the XTEN amino acid residues of the XTEN sequence contribute to secondary structure as measured or determined by the means described herein. “Substantially devoid,” as used in this context, means that at least about 60%, or about 70%, or about 80%, or about 90%, or about 95%, or at least about 99% of the XTEN amino acid residues of the XTEN sequence do not contribute to secondary structure, as measured or determined by the methods described herein.

[0155] A variety of methods have been established in the art to discern the presence or absence of secondary and tertiary structures in a given polypeptide. In particular, secondary structure can be measured spectrophotometrically, e.g., by circular dichroism spectroscopy in the “far-UV” spectral region (190-250 nm). Secondary structure elements, such as alpha-helix and beta-sheet, each give rise to a characteristic shape and magnitude of CD spectra. Secondary structure can also be predicted for a polypeptide sequence via certain computer programs or algorithms, such as the well-known Chou-Fasman algorithm (Chou, P. Y., et al. (1974) Biochemistry, 13: 222-45) and the Garnier-Osguthorpe-Robson algorithm (“Gor algorithm”) (Gamier J, Gibrat J F, Robson B. (1996), GOR method for predicting protein secondary structure from amino acid sequence. Methods Enzymol 266:540-553), as described in US Patent Application Publication No. 20030228309A1. For a given sequence, the algorithms can predict whether there exists some or no secondary structure at all, expressed as the total and/or percentage of residues of the sequence that form, for example, alpha-helices or beta-sheets or the percentage of residues of the sequence predicted to result in random coil formation (which lacks secondary structure). Polypeptide sequences can be analyzed using the Chou-Fasman algorithm using sites on the world wide web at, for example, fasta.bioch.virginia.edu/fasta_www2/fasta_www.cgi?rm=misc1 and the Gor algorithm at npsa-pbil.ibcp.fr/cgi-bin/npsa_automat.pl?page=npsa_gor4.html (both accessed on Sep. 5, 2012).

[0156] In one embodiment, the XTEN sequences used in the subject fusion protein compositions have an alpha-helix percentage ranging from 0% to less than about 5% as determined by the Chou-Fasman algorithm. In another embodiment, the XTEN sequences of the fusion protein compositions have a beta-sheet percentage ranging from 0% to less than about 5% as determined by the Chou-Fasman algorithm. In some embodiments, the XTEN sequences of the fusion protein compositions have an alpha-helix percentage ranging from 0% to less than about 5% and a beta-sheet percentage ranging from 0% to less than about 5% as determined by the Chou-Fasman algorithm. In one embodiment, the XTEN sequences of the fusion protein compositions have an alpha-helix percentage less than about 2% and a beta-sheet percentage less than about 2%. The XTEN sequences of the fusion protein compositions have a high degree of random coil percentage, as determined by the GOR algorithm. In some embodiments, an XTEN sequence have at least about 80%, more preferably at least about 90%, more preferably at least about 91%, more preferably at least about 92%, more preferably at least about 93%, more preferably at least about 94%, more preferably at least about 95%, more preferably at least about 96%, more preferably at least about 97%, more preferably at least about 98%, and most preferably at least about 99% random coil, as determined by the GOR algorithm. In one embodiment, the XTEN sequences of the fusion protein compositions have an alpha-helix percentage ranging from 0% to less than about 5% and a beta-sheet percentage ranging from 0% to less than about 5% as determined by the Chou-Fasman algorithm and at least about 90% random coil, as determined by the GOR algorithm. In another embodiment, the XTEN sequences of the fusion protein compositions have an alpha-helix percentage less than about 2% and a beta-sheet percentage less than about 2% at least about 90% random coil, as determined by the GOR algorithm.

[0157] 1. Non-Repetitive Sequences

[0158] It is contemplated that the XTEN sequences of the GLP2-XTEN embodiments are substantially non-repetitive. In general, repetitive amino acid sequences have a tendency to aggregate or form higher order structures, as exemplified by natural repetitive sequences such as collagens and leucine zippers. These repetitive amino acids may also tend to form contacts resulting in crystalline or pseudocrystaline structures. In contrast, the low tendency of non-repetitive sequences to aggregate enables the design of long-sequence XTENs with a relatively low frequency of charged amino acids that would otherwise be likely to aggregate if the sequences were repetitive. The non-repetitiveness of a subject XTEN can be observed by assessing one or more of the following features. In one embodiment, a “substantially non-repetitive” XTEN sequence has no three contiguous amino acids in the sequence that are of identical amino acid types unless the amino acid is serine, in which case no more than three contiguous amino acids are serine residues. In another embodiment, as described more fully below, a “substantially non-repetitive” XTEN sequence comprises motifs of 9 to 14 amino acid residues wherein the motifs consist of 3, 4, 5, or 6 types of amino acids selected from glycine (G), alanine (A), serine (S), threonine (T), glutamate (E) and proline (P), and wherein the sequence of any two contiguous amino acid residues in any one motif is not repeated more than twice in the sequence motif.

[0159] The degree of repetitiveness of a polypeptide or a gene can be measured by computer programs or algorithms or by other means known in the art. According to the current invention, algorithms to be used in calculating the degree of repetitiveness of a particular polypeptide, such as an XTEN, are disclosed herein, and examples of sequences analyzed by algorithms are provided (see Examples, below). In one embodiment, the repetitiveness of a polypeptide of a predetermined length can be calculated (hereinafter “subsequence score”) according to the formula given by Equation 1:

$$Subsequence score = 1$$

$$\begin{matrix}wherein : \\ length of\end{matrix} m = \frac{{\sum }_{i = 1}^{m} {Count}_{i}}{m} ( amino acid length of polypeptide ) - ( amino acid subsequence ) + 1 ; and$$

$${Count}_{i} = cumulative number of occurences$$

$$of each unique subsequence within {sequence}_{i}$$

[0160] An algorithm termed “SegScore” was developed to apply the foregoing equation to quantitate repetitiveness of polypeptides, such as an XTEN, providing the subsequence score wherein sequences of a predetermined amino acid length are analyzed for repetitiveness by determining the number of times (a “count”) a unique subsequence of length “s” appears in the set length, divided by the absolute number of subsequences within the predetermined length of the sequence. FIG. 1 depicts a logic flowchart of the SegScore algorithm, while FIG. 2 portrays a schematic of how a subsequence score is derived for a fictitious XTEN with 11 amino acids and a subsequence length of 3 amino acid residues. For example, a predetermined polypeptide length of 200 amino acid residues has 192 overlapping 9-amino acid subsequences and 198 3-mer subsequences, but the subsequence score of any given polypeptide will depend on the absolute number of unique subsequences and how frequently each unique subsequence (meaning a different amino acid sequence) appears in the predetermined length of the sequence.

[0161] In the context of the present invention, “subsequence score” means the sum of occurrences of each unique 3-mer frame across 200 consecutive amino acids of the cumulative XTEN polypeptide divided by the absolute number of unique 3-mer subsequences within the 200 amino acid sequence. Examples of such subsequence scores derived from 200 consecutive amino acids of repetitive and non-repetitive polypeptides are presented in Example 30. In one embodiment, the invention provides a GLP2-XTEN comprising one XTEN in which the XTEN has a subsequence score less than 12, more preferably less than 10, more preferably less than 9, more preferably less than 8, more preferably less than 7, more preferably less than 6, and most preferably less than 5. In another embodiment, the invention provides GLP2-XTEN comprising two more XTENs in which at least one XTEN has a subsequence score of less than 10, or less than 9, or less than 8, or less than 7, or less than 6, or less than 5, or less. In yet another embodiment, the invention provides GLP2-XTEN comprising at least two XTENs in which each individual XTEN of 36 or more amino acids has a subsequence score of less than 10, or less than 9, or less than 8, or less than 7, or less than 6, or less than 5, or less. In the embodiments of this paragraph, the XTEN is characterized as substantially non-repetitive.

[0162] In one aspect, the non-repetitive characteristic of XTEN of the present invention together with the particular types of amino acids that predominate in the XTEN, rather than the absolute primary sequence, confers one or more of the enhanced physicochemical and biological properties of the GLP2-XTEN fusion proteins. These enhanced properties include a higher degree of expression of the fusion protein in the host cell, greater genetic stability of the gene encoding XTEN, a greater degree of solubility, less tendency to aggregate, and enhanced pharmacokinetics of the resulting GLP2-XTEN compared to fusion proteins comprising polypeptides having repetitive sequences. These enhanced properties permit more efficient manufacturing, lower cost of goods, and/or facilitate the formulation of XTEN-comprising pharmaceutical preparations containing extremely high protein concentrations, in some cases exceeding 100 mg/ml. In some embodiments, the XTEN polypeptide sequences of the embodiments are designed to have a low degree of internal repetitiveness in order to reduce or substantially eliminate immunogenicity when administered to a mammal. Polypeptide sequences composed of short, repeated motifs largely limited to only three amino acids, such as glycine, serine and glutamate, may result in relatively high antibody titers when administered to a mammal despite the absence of predicted T-cell epitopes in these sequences. This may be caused by the repetitive nature of polypeptides, as it has been shown that immunogens with repeated epitopes, including protein aggregates, cross-linked immunogens, and repetitive carbohydrates are highly immunogenic and can, for example, result in the cross-linking of B-cell receptors causing B-cell activation. (Johansson, J., et al. (2007) Vaccine, 25:1676-82; Yankai, Z., et al. (2006) Biochem Biophys Res Commun, 345:1365-71; Hsu, C. T., et al. (2000) Cancer Res, 60:3701-5); Bachmann M F, et al. Eur J Immunol. (1995) 25(12):3445-3451).

[0163] 2. Exemplary Sequence Motifs

[0164] The present invention encompasses XTEN used as fusion partners that comprise multiple units of shorter sequences, or motifs, in which the amino acid sequences of the motifs are substantially non-repetitive. The non-repetitive property can be met even using a “building block” approach using a library of sequence motifs that are multimerized to create the XTEN sequences. While an XTEN sequence may consist of multiple units of as few as four different types of sequence motifs, because the motifs themselves generally consist of non-repetitive amino acid sequences, the overall XTEN sequence is designed to render the sequence substantially non-repetitive.

[0165] In one embodiment, an XTEN has a substantially non-repetitive sequence of greater than about 36 to about 3000, or about 100 to about 2000, or about 144 to about 1000 amino acid residues, or even longer wherein at least about 80%, or at least about 85%, or at least about 90%, or at least about 95%, or at least about 97%, or about 100% of the XTEN sequence consists of non-overlapping sequence motifs, and wherein each of the motifs has about 9 to 36 amino acid residues. As used herein, “non-overlapping” means that the individual motifs do not share amino acid residues but, rather, are linked to other motifs or amino acid residues in a linear fashion. In other embodiments, at least about 80%, or at least about 85%, or at least about 90%, or at least about 95%, or at least about 97%, or about 100% of the XTEN sequence consists of non-overlapping sequence motifs wherein each of the motifs has 9 to 14 amino acid residues. In still other embodiments, at least about 80%, or at least about 85%, or at least about 90%, or at least about 95%, or at least about 97%, or about 100% of the XTEN sequence consists of non-overlapping sequence motifs wherein each of the motifs has 12 amino acid residues. In these embodiments, it is preferred that the sequence motifs are composed of substantially (e.g., 90% or more) or exclusively small hydrophilic amino acids, such that the overall sequence has an unstructured, flexible characteristic. Examples of amino acids that are included in XTEN are, e.g., arginine, lysine, threonine, alanine, asparagine, glutamine, aspartate, glutamate, serine, and glycine. In one embodiment, XTEN sequences have predominately four to six types of amino acids selected from glycine (G), alanine (A), serine (S), threonine (T), glutamate (E) or proline (P) that are arranged in a substantially non-repetitive sequence that is greater than about 36 to about 3000, or about 100 to about 2000, or about 144 to about 1000 amino acid residues in length. In some embodiments, an XTEN sequence is made of 4, 5, or 6 types of amino acids selected from the group consisting of glycine (G), alanine (A), serine (S), threonine (T), glutamate (E) or proline (P). In some embodiments, XTEN have sequences of greater than about 36 to about 1000, or about 100 to about 2000, or about 400 to about 3000 amino acid residues wherein at least about 80% of the sequence consists of non-overlapping sequence motifs wherein each of the motifs has 9 to 36 amino acid residues and wherein at least 90%, or at least 91%, or at least 92%, or at least 93%, or at least 94%, or at least 95%, or at least 96%, or at least 97%, or 100% of each of the motifs consists of 4 to 6 types of amino acids selected from glycine (G), alanine (A), serine (S), threonine (T), glutamate (E) and proline (P), and wherein the content of any one amino acid type in the full-length XTEN does not exceed 30%. In other embodiments, at least about 90% of the XTEN sequence consists of non-overlapping sequence motifs wherein each of the motifs has 9 to 36 amino acid residues wherein the motifs consist of 4 to 6 types of amino acids selected from glycine (G), alanine (A), serine (S), threonine (T), glutamate (E) and proline (P), and wherein the content of any one amino acid type in the full-length XTEN does not exceed 40%, or about 30%, or about 25%. In other embodiments, at least about 90% of the XTEN sequence consists of non-overlapping sequence motifs wherein each of the motifs has 12 amino acid residues consisting of 4 to 6 types of amino acids selected from glycine (G), alanine (A), serine (S), threonine (T), glutamate (E) and proline (P), and wherein the content of any one amino acid type in the full-length XTEN does not exceed 40%, or 30%, or about 25%. In yet other embodiments, at least about 90%, or about 91%, or about 92%, or about 93%, or about 94%, or about 95%, or about 96%, or about 97%, or about 98%, or about 99%, to about 100% of the XTEN sequence consists of non-overlapping sequence motifs wherein each of the motifs has 12 amino acid residues consisting of glycine (G), alanine (A), serine (S), threonine (T), glutamate (E) and proline (P).

[0166] In still other embodiments, XTENs comprise substantially non-repetitive sequences of greater than about 36 to about 3000 amino acid residues wherein at least about 80%, or at least about 90%, or about 91%, or about 92%, or about 93%, or about 94%, or about 95%, or about 96%, or about 97%, or about 98%, or about 99% of the sequence consists of non-overlapping sequence motifs of 9 to 14 amino acid residues wherein the motifs consist of 4 to 6 types of amino acids selected from glycine (G), alanine (A), serine (S), threonine (T), glutamate (E) and proline (P), and wherein the sequence of any two contiguous amino acid residues in any one motif is not repeated more than twice in the sequence motif. In other embodiments, at least about 90%, or about 91%, or about 92%, or about 93%, or about 94%, or about 95%, or about 96%, or about 97%, or about 98%, or about 99% of an XTEN sequence consists of non-overlapping sequence motifs of 12 amino acid residues wherein the motifs consist of four to six types of amino acids selected from glycine (G), alanine (A), serine (S), threonine (T), glutamate (E) and proline (P), and wherein the sequence of any two contiguous amino acid residues in any one sequence motif is not repeated more than twice in the sequence motif. In other embodiments, at least about 90%, or about 91%, or about 92%, or about 93%, or about 94%, or about 95%, or about 96%, or about 97%, or about 98%, or about 99% of an XTEN sequence consists of non-overlapping sequence motifs of 12 amino acid residues wherein the motifs consist of glycine (G), alanine (A), serine (S), threonine (T), glutamate (E) and proline (P), and wherein the sequence of any two contiguous amino acid residues in any one sequence motif is not repeated more than twice in the sequence motif. In yet other embodiments, XTENs consist of 12 amino acid sequence motifs wherein the amino acids are selected from glycine (G), alanine (A), serine (S), threonine (T), glutamate (E) and proline (P), and wherein the sequence of any two contiguous amino acid residues in any one sequence motif is not repeated more than twice in the sequence motif, and wherein the content of any one amino acid type in the full-length XTEN does not exceed 30%. The foregoing embodiments are examples of substantially non-repetitive XTEN sequences. Additional examples are detailed below.

[0167] In some embodiments, the invention provides GLP2-XTEN compositions comprising one, or two, or three, or four, five, six or more non-repetitive XTEN sequence(s) of about 36 to about 1000 amino acid residues, or cumulatively about 100 to about 3000 amino acid residues wherein at least about 80%, or at least about 90%, or about 91%, or about 92%, or about 93%, or about 94%, or about 95%, or about 96%, or about 97%, or about 98%, or about 99% to about 100% of the sequence consists of multiple units of four or more non-overlapping sequence motifs selected from the amino acid sequences of Table 3, wherein the overall sequence remains substantially non-repetitive. In some embodiments, the XTEN comprises non-overlapping sequence motifs in which about 80%, or at least about 85%, or at least about 90%, or about 91%, or about 92%, or about 93%, or about 94%, or about 95%, or about 96%, or about 97%, or about 98%, or about 99% or about 100% of the sequence consists of multiple units of non-overlapping sequences selected from a single motif family selected from Table 3, resulting in a family sequence. Family as applied to motifs means that the XTEN has motifs selected from a motif category of Table 3; i.e., AD, AE, AF, AG, AM, AQ, BC, or BD, and that any other amino acids in the XTEN not from a motif family are selected to achieve a needed property, such as to permit incorporation of a restriction site by the encoding nucleotides, incorporation of a cleavage sequence, or to achieve a better linkage to a GLP-2 component of the GLP2-XTEN. In some embodiments of XTEN families, an XTEN sequence comprises multiple units of non-overlapping sequence motifs of the AD motif family, or of the AE motif family, or of the AF motif family, or of the AG motif family, or of the AM motif family, or of the AQ motif family, or of the BC family, or of the BD family, with the resulting XTEN exhibiting the range of homology described above. In other embodiments, of XTEN families, each XTEN of a given family has at least four different motifs of the same family from Table 3; e.g., four motifs of AD or AE or

[0168] AF or AG or AM, etc. In other embodiments, the XTEN comprises multiple units of motif sequences from two or more of the motif families of Table 3, selected to achieve desired physicochemical characteristics, including such properties as net charge, lack of secondary structure, or lack of repetitiveness that may be conferred by the amino acid composition of the motifs, described more fully below. In the embodiments hereinabove described in this paragraph, the motifs or portions of the motifs incorporated into the XTEN can be selected and assembled using the methods described herein to achieve an XTEN of about 36, about 42, about 72, about 144, about 288, about 576, about 864, about 1000, about 2000 to about 3000 amino acid residues, or any intermediate length. Non-limiting examples of XTEN family sequences useful for incorporation into the subject GLP2-XTEN are presented in Table 4. It is intended that a specified sequence mentioned relative to Table 4 has that sequence set forth in Table 4, while a generalized reference to an AE144 sequence, for example, is intended to encompass any AE sequence having 144 amino acid residues; e.g., AE144_1A, AE144_2A, etc., or a generalized reference to an AG144 sequence, for example, is intended to encompass any AG sequence having 144 amino acid residues, e.g., AG144_1, AG144_2, AG144_A, AG144_B, AG144_C, etc.

TABLE 3
XTEN Sequence Motifs of 12 Amino Acids and Motif
Families

| | | SEQ ID |
|---|---|---|
| Motif Family* | MOTIF SEQUENCE | NO: |
| AD | GESPGGSSGSES | 25 |
| AD | GSEGSSGPGESS | 26 |
| AD | GSSESGSSEGGP | 27 |
| AD | GSGGEPSESGSS | 28 |
| AE, AM | GSPAGSPTSTEE | 29 |
| AE, AM, AQ | GSEPATSGSETP | 30 |
| AE, AM, AQ | GTSESATPESGP | 31 |
| AE, AM, AQ | GTSTEPSEGSAP | 32 |
| AF, AM | GSTSESPSGTAP | 33 |
| AF, AM | GTSTPESGSASP | 34 |
| AF, AM | GTSPSGESSTAP | 35 |
| AF, AM | GSTSSTAESPGP | 36 |
| AG, AM | GTPGSGTASSSP | 37 |
| AG, AM | GSSTPSGATGSP | 38 |
| AG, AM | GSSPSASTGTGP | 39 |
| AG, AM | GASPGTSSTGSP | 40 |
| AQ | GEPAGSPTSTSE | 41 |
| AQ | GTGEPSSTPASE | 42 |
| AQ | GSGPSTESAPTE | 43 |
| AQ | GSETPSGPSETA | 44 |
| AQ | GPSETSTSEPGA | 45 |
| AQ | GSPSEPTEGTSA | 46 |
| BC | GSGASEPTSTEP | 47 |
| BC | GSEPATSGTEPS | 48 |
| BC | GTSEPSTSEPGA | 49 |
| BC | GTSTEPSEPGSA | 50 |
| BD | GSTAGSETSTEA | 51 |
| BD | GSETATSGSETA | 52 |
| BD | GTSESATSESGA | 53 |
| BD | GTSTEASEGSAS | 54 |

*Denotes individual motif sequences that, when used together in various permutations, results in a “family sequence”

TABLE 4
XTEN Polypeptides

| XTEN | | SEQ ID |
|---|---|---|
| Name | Amino Acid Sequence | NO: |
| AE42 | GAPGSPAGSPTSTEEGTSESATPESGPGSEPATSGSETPASS | 55 |
| AE42_1 | TEPSEGSAPGSPAGSPTSTEEGTSESATPESGPGSEPATSGS | 56 |
| AE42_2 | PAGSPTSTEEGTSTEPSEGSAPGTSESATPESGPGSEPATSG | 57 |
| AE42_3 | SEPATSGSETPGTSESATPESGPGTSTEPSEGSAPGSPAGSP | 58 |
| AG42_1 | GAPSPSASTGTGPGTPGSGTASSSPGSSTPSGATGSPGPSGP | 59 |
| AG42_2 | GPGTPGSGTASSSPGSSTPSGATGSPGSSPSASTGTGPGASP | 60 |
| AG42_3 | SPSASTGTGPGASPGTSSTGSPGTPGSGTASSSPGSSTPSGA | 61 |
| AG42_4 | SASTGTGPGASPGTSSTGSPGTPGSGTASSSPGSSTPSGATG | 62 |
| AE48 | MAEPAGSPTSTEEGTPGSGTASSSPGSSTPSGATGSPGASPGTSSTGS | 63 |
| AM48 | MAEPAGSPTSTEEGASPGTSSTGSPGSSTPSGATGSPGSSTPSGATGS | 64 |
| AE144 | GSEPATSGSETPGTSESATPESGPGSEPATSGSETPGSPAGSPTSTEEGTSTEPSEG | 65 |
| | SAPGSEPATSGSETPGSEPATSGSETPGSEPATSGSETPGTSTEPSEGSAPGTSESA | |
| | TPESGPGSEPATSGSETPGTSTEPSEGSAP | |
| AE144_1A | SPAGSPTSTEEGTSESATPESGPGTSTEPSEGSAPGSPAGSPTSTEEGTSTEPSEGS | 66 |
| | APGTSTEPSEGSAPGTSESATPESGPGSEPATSGSETPGSEPATSGSETPGSPAGSP | |
| | TSTEEGTSESATPESGPGTSTEPSEGSAPG | |
| AE144_2A | TSTEPSEGSAPGSPAGSPTSTEEGTSTEPSEGSAPGTSTEPSEGSAPGTSESATPES | 67 |
| | GPGTSTEPSEGSAPGTSESATPESGPGSEPATSGSETPGTSTEPSEGSAPGTSTEPS | |
| | EGSAPGTSESATPESGPGTSESATPESGPG | |
| AE144_2B | TSTEPSEGSAPGSPAGSPTSTEEGTSTEPSEGSAPGTSTEPSEGSAPGTSESATPES | 68 |
| | GPGTSTEPSEGSAPGTSESATPESGPGSEPATSGSETPGTSTEPSEGSAPGTSTEPS | |
| | EGSAPGTSESATPESGPGTSESATPESGPG | |
| AE144_3A | SPAGSPTSTEEGTSESATPESGPGSEPATSGSETPGTSESATPESGPGTSTEPSEGS | 69 |
| | APGTSTEPSEGSAPGTSTEPSEGSAPGTSTEPSEGSAPGTSTEPSEGSAPGTSTEPS | |
| | EGSAPGSPAGSPTSTEEGTSTEPSEGSAPG | |
| AE144_3B | SPAGSPTSTEEGTSESATPESGPGSEPATSGSETPGTSESATPESGPGTSTEPSEGS | 70 |
| | APGTSTEPSEGSAPGTSTEPSEGSAPGTSTEPSEGSAPGTSTEPSEGSAPGTSTEPS | |
| | EGSAPGSPAGSPTSTEEGTSTEPSEGSAPG | |
| AE144_4A | TSESATPESGPGSEPATSGSETPGTSESATPESGPGSEPATSGSETPGTSESATPES | 71 |
| | GPGTSTEPSEGSAPGTSESATPESGPGSPAGSPTSTEEGSPAGSPTSTEEGSPAGSP | |
| | TSTEEGTSESATPESGPGTSTEPSEGSAPG | |
| AE144_4B | TSESATPESGPGSEPATSGSETPGTSESATPESGPGSEPATSGSETPGTSESATPES | 72 |
| | GPGTSTEPSEGSAPGTSESATPESGPGSPAGSPTSTEEGSPAGSPTSTEEGSPAGSP | |
| | TSTEEGTSESATPESGPGTSTEPSEGSAPG | |
| AE144_5A | TSESATPESGPGSEPATSGSETPGTSESATPESGPGSEPATSGSETPGTSESATPES | 73 |
| | GPGTSTEPSEGSAPGSPAGSPTSTEEGTSESATPESGPGSEPATSGSETPGTSESAT | |
| | PESGPGSPAGSPTSTEEGSPAGSPTSTEEG | |
| AE144_6B | TSTEPSEGSAPGTSESATPESGPGTSESATPESGPGTSESATPESGPGSEPATSGSE | 74 |
| | TPGSEPATSGSETPGSPAGSPTSTEEGTSTEPSEGSAPGTSTEPSEGSAPGSEPATS | |
| | GSETPGTSESATPESGPGTSTEPSEGSAPG | |
| AF144 | GTSTPESGSASPGTSPSGESSTAPGTSPSGESSTAPGSTSSTAESPGPGSTSESPSG | 75 |
| | TAPGSTSSTAESPGPGTSPSGESSTAPGTSTPESGSASPGSTSSTAESPGPGTSPSG | |
| | ESSTAPGTSPSGESSTAPGTSPSGESSTAP | |
| AG144_1 | SGTASSSPGSSTPSGATGSPGTPGSGTASSSPGSSTPSGATGSPGSSTPSGATGSP | 76 |
| | GSSPSASTGTGPGSSPSASTGTGPGASPGTSSTGSPGTPGSGTASSSPGSSTPSGA | |
| | TGSPGSSPSASTGTGPGSSPSASTGTGPGASP | |
| AG144_2 | PGSSPSASTGTGPGSSPSASTGTGPGTPGSGTASSSPGSSTPSGATGSPGSSPSAST | 77 |
| | GTGPGASPGTSSTGSPGTPGSGTASSSPGSSTPSGATGSPGTPGSGTASSSPGASP | |
| | GTSSTGSPGASPGTSSTGSPGTPGSGTASSS | |
| AG144_A | GASPGTSSTGSPGSSPSASTGTGPGSSPSASTGTGPGTPGSGTASSSPGSSTPSGA | 78 |
| | TGSPGSSPSASTGTGPGASPGTSSTGSPGTPGSGTASSSPGSSTPSGATGSPGTPG | |
| | SGTASSSPGASPGTSSTGSPGASPGTSSTGSP | |
| AG144_B | GTPGSGTASSSPGSSTPSGATGSPGASPGTSSTGSPGTPGSGTASSSPGSSTPSGA | 79 |
| | TGSPGSSPSASTGTGPGSSPSASTGTGPGSSTPSGATGSPGSSTPSGATGSPGASP | |
| | GTSSTGSPGASPGTSSTGSPGASPGTSSTGSP | |
| AG144_C | GTPGSGTASSSPGASPGTSSTGSPGASPGTSSTGSPGASPGTSSTGSPGSSPSAST | 80 |
| | GTGPGTPGSGTASSSPGASPGTSSTGSPGASPGTSSTGSPGASPGTSSTGSPGSST | |
| | PSGATGSPGSSTPSGATGSPGASPGTSSTGSP | |
| AG144_F | GSSPSASTGTGPGSSPSASTGTGPGASPGTSSTGSPGASPGTSSTGSPGSSTPSGA | 81 |
| | TGSPGSSPSASTGTGPGASPGTSSTGSPGSSPSASTGTGPGTPGSGTASSSPGSSTP | |
| | SGATGSPGSSTPSGATGSPGASPGTSSTGSP | |
| AG144_3 | GTPGSGTASSSPGSSTPSGATGSPGSSTPSGATGSPGSSPSASTGTGPGSSPSAST | 82 |
| | GTGPGASPGTSSTGSPGTPGSGTASSSPGSSTPSGATGSPGSSPSASTGTGPGSSP | |
| | SASTGTGPGASPGTSSTGSPGASPGTSSTGSP | |
| AG144_4 | GTPGSGTASSSPGSSTPSGATGSPGSSPSASTGTGPGSSPSASTGTGPGASPGTSS | 83 |
| | TGSPGASPGTSSTGSPGSSTPSGATGSPGSSPSASTGTGPGASPGTSSTGSPGSSPS | |
| | ASTGTGPGTPGSGTASSSPGSSTPSGATGSP | |
| AE288 1 | GTSESATPESGPGSEPATSGSETPGTSESATPESGPGSEPATSGSETPGTSESATPE | 84 |
| | SGPGTSTEPSEGSAPGSPAGSPTSTEEGTSESATPESGPGSEPATSGSETPGTSESA | |
| | TPESGPGSPAGSPTSTEEGSPAGSPTSTEEGTSTEPSEGSAPGTSESATPESGPGTS | |
| | ESATPESGPGTSESATPESGPGSEPATSGSETPGSEPATSGSETPGSPAGSPTSTEE | |
| | GTSTEPSEGSAPGTSTEPSEGSAPGSEPATSGSETPGTSESATPESGPGTSTEPSEG | |
| | SAP | |
| AE288-2 | GSPAGSPTSTEEGTSESATPESGPGSEPATSGSETPGTSESATPESGPGTSTEPSEG | 85 |
| | SAPGTSTEPSEGSAPGTSTEPSEGSAPGTSTEPSEGSAPGTSTEPSEGSAPGTSTEP | |
| | SEGSAPGSPAGSPTSTEEGTSTEPSEGSAPGTSESATPESGPGSEPATSGSETPGTS | |
| | ESATPESGPGSEPATSGSETPGTSESATPESGPGTSTEPSEGSAPGTSESATPESGP | |
| | GSPAGSPTSTEEGSPAGSPTSTEEGSPAGSPTSTEEGTSESATPESGPGTSTEPSEG | |
| | SAP | |
| AG288-1 | PGASPGTSSTGSPGASPGTSSTGSPGTPGSGTASSSPGSSTPSGATGSPGTPGSGT | 86 |
| | ASSSPGSSTPSGATGSPGTPGSGTASSSPGSSTPSGATGSPGSSTPSGATGSPGSSP | |
| | SASTGTGPGSSPSASTGTGPGASPGTSSTGSPGTPGSGTASSSPGSSTPSGATGSP | |
| | GSSPSASTGTGPGSSPSASTGTGPGASPGTSSTGSPGASPGTSSTGSPGSSTPSGA | |
| | TGSPGSSPSASTGTGPGASPGTSSTGSPGSSPSASTGTGPGTPGSGTASSSPGSSTP | |
| | SGATGS | |
| AG288-2 | GSSPSASTGTGPGSSPSASTGTGPGTPGSGTASSSPGSSTPSGATGSPGSSPSAST | 87 |
| | GTGPGASPGTSSTGSPGTPGSGTASSSPGSSTPSGATGSPGTPGSGTASSSPGASP | |
| | GTSSTGSPGASPGTSSTGSPGTPGSGTASSSPGSSTPSGATGSPGASPGTSSTGSP | |
| | GTPGSGTASSSPGSSTPSGATGSPGSSPSASTGTGPGSSPSASTGTGPGSSTPSGA | |
| | TGSPGSSTPSGATGSPGASPGTSSTGSPGASPGTSSTGSPGASPGTSSTGSPGTPG | |
| | SGTASSSP | |
| AF504 | GASPGTSSTGSPGSSPSASTGTGPGSSPSASTGTGPGTPGSGTASSSPGSSTPSGA | 88 |
| | TGSPGSXPSASTGTGPGASPGTSSTGSPGTPGSGTASSSPGSSTPSGATGSPGTPG | |
| | SGTASSSPGASPGTSSTGSPGASPGTSSTGSPGTPGSGTASSSPGSSTPSGATGSP | |
| | GASPGTSSTGSPGTPGSGTASSSPGSSTPSGATGSPGSXPSASTGTGPGSSPSAST | |
| | GTGPGSSTPSGATGSPGSSTPSGATGSPGASPGTSSTGSPGASPGTSSTGSPGASP | |
| | GTSSTGSPGTPGSGTASSSPGASPGTSSTGSPGASPGTSSTGSPGASPGTSSTGSP | |
| | GSSPSASTGTGPGTPGSGTASSSPGASPGTSSTGSPGASPGTSSTGSPGASPGTSS | |
| | TGSPGSSTPSGATGSPGSSTPSGATGSPGASPGTSSTGSPGTPGSGTASSSPGSSTP | |
| | SGATGSPGSSTPSGATGSPGSSTPSGATGSPGSSPSASTGTGPGASPGTSSTGSP | |
| AF540 | GSTSSTAESPGPGSTSSTAESPGPGSTSESPSGTAPGSTSSTAESPGPGSTSSTAES | 89 |
| | PGPGTSTPESGSASPGSTSESPSGTAPGTSPSGESSTAPGSTSESPSGTAPGSTSES | |
| | PSGTAPGTSPSGESSTAPGSTSESPSGTAPGSTSESPSGTAPGTSPSGESSTAPGST | |
| | SESPSGTAPGSTSESPSGTAPGSTSESPSGTAPGTSTPESGSASPGSTSESPSGTAP | |
| | GTSTPESGSASPGSTSSTAESPGPGSTSSTAESPGPGTSTPESGSASPGTSTPESGS | |
| | ASPGSTSESPSGTAPGTSTPESGSASPGTSTPESGSASPGSTSESPSGTAPGSTSES | |
| | PSGTAPGSTSESPSGTAPGSTSSTAESPGPGTSTPESGSASPGTSTPESGSASPGST | |
| | SESPSGTAPGSTSESPSGTAPGTSTPESGSASPGSTSESPSGTAPGSTSESPSGTAP | |
| | GTSTPESGSASPGTSPSGESSTAPGSTSSTAESPGPGTSPSGESSTAPGSTSSTAES | |
| | PGPGTSTPESGSASPGSTSESPSGTAP | |
| AD576 | GSSESGSSEGGPGSGGEPSESGSSGSSESGSSEGGPGSSESGSSEGGPGSSESGSSE | 90 |
| | GGPGSSESGSSEGGPGSSESGSSEGGPGESPGGSSGSESGSEGSSGPGESSGSSES | |
| | GSSEGGPGSSESGSSEGGPGSSESGSSEGGPGSGGEPSESGSSGESPGGSSGSESG | |
| | ESPGGSSGSESGSGGEPSESGSSGSSESGSSEGGPGSGGEPSESGSSGSGGEPSES | |
| | GSSGSEGSSGPGESSGESPGGSSGSESGSGGEPSESGSSGSGGEPSESGSSGSGGE | |
| | PSESGSSGSSESGSSEGGPGESPGGSSGSESGESPGGSSGSESGESPGGSSGSESGE | |
| | SPGGSSGSESGESPGGSSGSESGSSESGSSEGGPGSGGEPSESGSSGSEGSSGPGE | |
| | SSGSSESGSSEGGPGSGGEPSESGSSGSSESGSSEGGPGSGGEPSESGSSGESPGG | |
| | SSGSESGESPGGSSGSESGSSESGSSEGGPGSGGEPSESGSSGSSESGSSEGGPGS | |
| | GGEPSESGSSGSGGEPSESGSSGESPGGSSGSESGSEGSSGPGESSGSSESGSSEG | |
| | GPGSEGSSGPGESS | |
| AE576 | GSPAGSPTSTEEGTSESATPESGPGTSTEPSEGSAPGSPAGSPTSTEEGTSTEPSEG | 91 |
| | SAPGTSTEPSEGSAPGTSESATPESGPGSEPATSGSETPGSEPATSGSETPGSPAGS | |
| | PTSTEEGTSESATPESGPGTSTEPSEGSAPGTSTEPSEGSAPGSPAGSPTSTEEGTS | |
| | TEPSEGSAPGTSTEPSEGSAPGTSESATPESGPGTSTEPSEGSAPGTSESATPESGP | |
| | GSEPATSGSETPGTSTEPSEGSAPGTSTEPSEGSAPGTSESATPESGPGTSESATPE | |
| | SGPGSPAGSPTSTEEGTSESATPESGPGSEPATSGSETPGTSESATPESGPGTSTEP | |
| | SEGSAPGTSTEPSEGSAPGTSTEPSEGSAPGTSTEPSEGSAPGTSTEPSEGSAPGTS | |
| | TEPSEGSAPGSPAGSPTSTEEGTSTEPSEGSAPGTSESATPESGPGSEPATSGSETP | |
| | GTSESATPESGPGSEPATSGSETPGTSESATPESGPGTSTEPSEGSAPGTSESATPE | |
| | SGPGSPAGSPTSTEEGSPAGSPTSTEEGSPAGSPTSTEEGTSESATPESGPGTSTEP | |
| | SEGSAP | |
| AF576 | GSTSSTAESPGPGSTSSTAESPGPGSTSESPSGTAPGSTSSTAESPGPGSTSSTAES | 92 |
| | PGPGTSTPESGSASPGSTSESPSGTAPGTSPSGESSTAPGSTSESPSGTAPGSTSES | |
| | PSGTAPGTSPSGESSTAPGSTSESPSGTAPGSTSESPSGTAPGTSPSGESSTAPGST | |
| | SESPSGTAPGSTSESPSGTAPGSTSESPSGTAPGTSTPESGSASPGSTSESPSGTAP | |
| | GTSTPESGSASPGSTSSTAESPGPGSTSSTAESPGPGTSTPESGSASPGTSTPESGS | |
| | ASPGSTSESPSGTAPGTSTPESGSASPGTSTPESGSASPGSTSESPSGTAPGSTSES | |
| | PSGTAPGSTSESPSGTAPGSTSSTAESPGPGTSTPESGSASPGTSTPESGSASPGST | |
| | SESPSGTAPGSTSESPSGTAPGTSTPESGSASPGSTSESPSGTAPGSTSESPSGTAP | |
| | GTSTPESGSASPGTSPSGESSTAPGSTSSTAESPGPGTSPSGESSTAPGSTSSTAES | |
| | PGPGTSTPESGSASPGSTSESPSGTAPGSTSSTAESPGPGTSTPESGSASPGTSTPE | |
| | SGSASP | |
| AG576 | PGTPGSGTASSSPGSSTPSGATGSPGSSPSASTGTGPGSSPSASTGTGPGSSTPSG | 93 |
| | ATGSPGSSTPSGATGSPGASPGTSSTGSPGASPGTSSTGSPGASPGTSSTGSPGTP | |
| | GSGTASSSPGASPGTSSTGSPGASPGTSSTGSPGASPGTSSTGSPGSSPSASTGTG | |
| | PGTPGSGTASSSPGASPGTSSTGSPGASPGTSSTGSPGASPGTSSTGSPGSSTPSG | |
| | ATGSPGSSTPSGATGSPGASPGTSSTGSPGTPGSGTASSSPGSSTPSGATGSPGSS | |
| | TPSGATGSPGSSTPSGATGSPGSSPSASTGTGPGASPGTSSTGSPGASPGTSSTGS | |
| | PGTPGSGTASSSPGASPGTSSTGSPGASPGTSSTGSPGASPGTSSTGSPGASPGTS | |
| | STGSPGTPGSGTASSSPGSSTPSGATGSPGTPGSGTASSSPGSSTPSGATGSPGTP | |
| | GSGTASSSPGSSTPSGATGSPGSSTPSGATGSPGSSPSASTGTGPGSSPSASTGTG | |
| | PGASPGTSSTGSPGTPGSGTASSSPGSSTPSGATGSPGSSPSASTGTGPGSSPSAS | |
| | TGTGPGASPGTSSTGS | |
| AE624 | MAEPAGSPTSTEEGTPGSGTASSSPGSSTPSGATGSPGASPGTSSTGSPGSPAGS | 94 |
| | PTSTEEGTSESATPESGPGTSTEPSEGSAPGSPAGSPTSTEEGTSTEPSEGSAPGT | |
| | STEPSEGSAPGTSESATPESGPGSEPATSGSETPGSEPATSGSETPGSPAGSPTST | |
| | EEGTSESATPESGPGTSTEPSEGSAPGTSTEPSEGSAPGSPAGSPTSTEEGTSTEP | |
| | SEGSAPGTSTEPSEGSAPGTSESATPESGPGTSTEPSEGSAPGTSESATPESGPGS | |
| | EPATSGSETPGTSTEPSEGSAPGTSTEPSEGSAPGTSESATPESGPGTSESATPES | |
| | GPGSPAGSPTSTEEGTSESATPESGPGSEPATSGSETPGTSESATPESGPGTSTEP | |
| | SEGSAPGTSTEPSEGSAPGTSTEPSEGSAPGTSTEPSEGSAPGTSTEPSEGSAPGT | |
| | STEPSEGSAPGSPAGSPTSTEEGTSTEPSEGSAPGTSESATPESGPGSEPATSGSE | |
| | TPGTSESATPESGPGSEPATSGSETPGTSESATPESGPGTSTEPSEGSAPGTSESA | |
| | TPESGPGSPAGSPTSTEEGSPAGSPTSTEEGSPAGSPTSTEEGTSESATPESGPGT | |
| | STEPSEGSAP | |
| AD836 | GSSESGSSEGGPGSSESGSSEGGPGESPGGSSGSESGSGGEPSESGSSGESPGGSS | 95 |
| | GSESGESPGGSSGSESGSSESGSSEGGPGSSESGSSEGGPGSSESGSSEGGPGESP | |
| | GGSSGSESGESPGGSSGSESGESPGGSSGSESGSSESGSSEGGPGSSESGSSEGGP | |
| | GSSESGSSEGGPGSSESGSSEGGPGSSESGSSEGGPGSSESGSSEGGPGSGGEPSE | |
| | SGSSGESPGGSSGSESGESPGGSSGSESGSGGEPSESGSSGSEGSSGPGESSGSSE | |
| | SGSSEGGPGSGGEPSESGSSGSEGSSGPGESSGSSESGSSEGGPGSGGEPSESGSS | |
| | GESPGGSSGSESGSGGEPSESGSSGSGGEPSESGSSGSSESGSSEGGPGSGGEPSE | |
| | SGSSGSGGEPSESGSSGSEGSSGPGESSGESPGGSSGSESGSEGSSGPGESSGSEG | |
| | SSGPGESSGSGGEPSESGSSGSSESGSSEGGPGSSESGSSEGGPGESPGGSSGSES | |
| | GSGGEPSESGSSGSEGSSGPGESSGESPGGSSGSESGSEGSSGPGSSESGSSEGGP | |
| | GSGGEPSESGSSGSEGSSGPGESSGSEGSSGPGESSGSEGSSGPGESSGSGGEPSE | |
| | SGSSGSGGEPSESGSSGESPGGSSGSESGESPGGSSGSESGSGGEPSESGSSGSEG | |
| | SSGPGESSGESPGGSSGSESGSSESGSSEGGPGSSESGSSEGGPGSSESGSSEGGP | |
| | GSGGEPSESGSSGSSESGSSEGGPGESPGGSSGSESGSGGEPSESGSSGSSESGSS | |
| | EGGPGESPGGSSGSESGSGGEPSESGSSGESPGGSSGSESGSGGEPSESGSS | |
| AE864 | GSPAGSPTSTEEGTSESATPESGPGTSTEPSEGSAPGSPAGSPTSTEEGTSTEPSE | 96 |
| | GSAPGTSTEPSEGSAPGTSESATPESGPGSEPATSGSETPGSEPATSGSETPGSPA | |
| | GSPTSTEEGTSESATPESGPGTSTEPSEGSAPGTSTEPSEGSAPGSPAGSPTSTEE | |
| | GTSTEPSEGSAPGTSTEPSEGSAPGTSESATPESGPGTSTEPSEGSAPGTSESATP | |
| | ESGPGSEPATSGSETPGTSTEPSEGSAPGTSTEPSEGSAPGTSESATPESGPGTSE | |
| | SATPESGPGSPAGSPTSTEEGTSESATPESGPGSEPATSGSETPGTSESATPESGP | |
| | GTSTEPSEGSAPGTSTEPSEGSAPGTSTEPSEGSAPGTSTEPSEGSAPGTSTEPSE | |
| | GSAPGTSTEPSEGSAPGSPAGSPTSTEEGTSTEPSEGSAPGTSESATPESGPGSEP | |
| | ATSGSETPGTSESATPESGPGSEPATSGSETPGTSESATPESGPGTSTEPSEGSAP | |
| | GTSESATPESGPGSPAGSPTSTEEGSPAGSPTSTEEGSPAGSPTSTEEGTSESATP | |
| | ESGPGTSTEPSEGSAPGTSESATPESGPGSEPATSGSETPGTSESATPESGPGSEP | |
| | ATSGSETPGTSESATPESGPGTSTEPSEGSAPGSPAGSPTSTEEGTSESATPESGP | |
| | GSEPATSGSETPGTSESATPESGPGSPAGSPTSTEEGSPAGSPTSTEEGTSTEPSE | |
| | GSAPGTSESATPESGPGTSESATPESGPGTSESATPESGPGSEPATSGSETPGSEP | |
| | ATSGSETPGSPAGSPTSTEEGTSTEPSEGSAPGTSTEPSEGSAPGSEPATSGSETP | |
| | GTSESATPESGPGTSTEPSEGSAP | |
| AF864 | GSTSESPSGTAPGTSPSGESSTAPGSTSESPSGTAPGSTSESPSGTAPGTSTPESGS | 97 |
| | ASPGTSTPESGSASPGSTSESPSGTAPGSTSESPSGTAPGTSPSGESSTAPGSTSES | |
| | PSGTAPGTSPSGESSTAPGTSPSGESSTAPGSTSSTAESPGPGTSPSGESSTAPGTS | |
| | PSGESSTAPGSTSSTAESPGPGTSTPESGSASPGTSTPESGSASPGSTSESPSGTAP | |
| | GSTSESPSGTAPGTSTPESGSASPGSTSSTAESPGPGTSTPESGSASPGSTSESPSG | |
| | TAPGTSPSGESSTAPGSTSSTAESPGPGTSPSGESSTAPGTSTPESGSASPGSTSST | |
| | AESPGPGSTSSTAESPGPGSTSSTAESPGPGSTSSTAESPGPGTSPSGESSTAPGST | |
| | SESPSGTAPGSTSESPSGTAPGTSTPESGPXXXGASASGAPSTXXXXSESPSGTA | |
| | PGSTSESPSGTAPGSTSESPSGTAPGSTSESPSGTAPGSTSESPSGTAPGSTSESPS | |
| | GTAPGTSTPESGSASPGTSPSGESSTAPGTSPSGESSTAPGSTSSTAESPGPGTSPS | |
| | GESSTAPGTSTPESGSASPGSTSESPSGTAPGSTSESPSGTAPGTSPSGESSTAPGS | |
| | TSESPSGTAPGTSTPESGSASPGTSTPESGSASPGSTSESPSGTAPGTSTPESGSAS | |
| | PGSTSSTAESPGPGSTSESPSGTAPGSTSESPSGTAPGTSPSGESSTAPGSTSSTAE | |
| | SPGPGTSPSGESSTAPGTSTPESGSASPGTSPSGESSTAPGTSPSGESSTAPGTSPS | |
| | GESSTAPGSTSSTAESPGPGSTSSTAESPGPGTSPSGESSTAPGSSPSASTGTGPG | |
| | SSTPSGATGSPGSSTPSGATGSP | |
| AG864-2 | GASPGTSSTGSPGSSPSASTGTGPGSSPSASTGTGPGTPGSGTASSSPGSSTPSGA | 98 |
| | TGSPGSSPSASTGTGPGASPGTSSTGSPGTPGSGTASSSPGSSTPSGATGSPGTPG | |
| | SGTASSSPGASPGTSSTGSPGASPGTSSTGSPGTPGSGTASSSPGSSTPSGATGSP | |
| | GASPGTSSTGSPGTPGSGTASSSPGSSTPSGATGSPGSSPSASTGTGPGSSPSAST | |
| | GTGPGSSTPSGATGSPGSSTPSGATGSPGASPGTSSTGSPGASPGTSSTGSPGASP | |
| | GTSSTGSPGTPGSGTASSSPGASPGTSSTGSPGASPGTSSTGSPGASPGTSSTGSP | |
| | GSSPSASTGTGPGTPGSGTASSSPGASPGTSSTGSPGASPGTSSTGSPGASPGTSS | |
| | TGSPGSSTPSGATGSPGSSTPSGATGSPGASPGTSSTGSPGTPGSGTASSSPGSST | |
| | PSGATGSPGSSTPSGATGSPGSSTPSGATGSPGSSPSASTGTGPGASPGTSSTGSP | |
| | GASPGTSSTGSPGTPGSGTASSSPGASPGTSSTGSPGASPGTSSTGSPGASPGTSS | |
| | TGSPGASPGTSSTGSPGTPGSGTASSSPGSSTPSGATGSPGTPGSGTASSSPGSST | |
| | PSGATGSPGTPGSGTASSSPGSSTPSGATGSPGSSTPSGATGSPGSSPSASTGTGP | |
| | GSSPSASTGTGPGASPGTSSTGSPGTPGSGTASSSPGSSTPSGATGSPGSSPSAST | |
| | GTGPGSSPSASTGTGPGASPGTSSTGSPGASPGTSSTGSPGSSTPSGATGSPGSSP | |
| | SASTGTGPGASPGTSSTGSPGSSPSASTGTGPGTPGSGTASSSPGSSTPSGATGSP | |
| | GSSTPSGATGSPGASPGTSSTGSP | |
| AM875 | GTSTEPSEGSAPGSEPATSGSETPGSPAGSPTSTEEGSTSSTAESPGPGTSTPESG | 99 |
| | SASPGSTSESPSGTAPGSTSESPSGTAPGTSTPESGSASPGTSTPESGSASPGSEPA | |
| | TSGSETPGTSESATPESGPGSPAGSPTSTEEGTSTEPSEGSAPGTSESATPESGPG | |
| | TSTEPSEGSAPGTSTEPSEGSAPGSPAGSPTSTEEGTSTEPSEGSAPGTSTEPSEGS | |
| | APGTSESATPESGPGTSESATPESGPGTSTEPSEGSAPGTSTEPSEGSAPGTSESA | |
| | TPESGPGTSTEPSEGSAPGSEPATSGSETPGSPAGSPTSTEEGSSTPSGATGSPGT | |
| | PGSGTASSSPGSSTPSGATGSPGTSTEPSEGSAPGTSTEPSEGSAPGSEPATSGSE | |
| | TPGSPAGSPTSTEEGSPAGSPTSTEEGTSTEPSEGSAPGASASGAPSTGGTSESAT | |
| | PESGPGSPAGSPTSTEEGSPAGSPTSTEEGSTSSTAESPGPGSTSESPSGTAPGTSP | |
| | SGESSTAPGTPGSGTASSSPGSSTPSGATGSPGSSPSASTGTGPGSEPATSGSETP | |
| | GTSESATPESGPGSEPATSGSETPGSTSSTAESPGPGSTSSTAESPGPGTSPSGESS | |
| | TAPGSEPATSGSETPGSEPATSGSETPGTSTEPSEGSAPGSTSSTAESPGPGTSTP | |
| | ESGSASPGSTSESPSGTAPGTSTEPSEGSAPGTSTEPSEGSAPGTSTEPSEGSAPG | |
| | SSTPSGATGSPGSSPSASTGTGPGASPGTSSTGSPGSEPATSGSETPGTSESATPE | |
| | SGPGSPAGSPTSTEEGSSTPSGATGSPGSSPSASTGTGPGASPGTSSTGSPGTSES | |
| | ATPESGPGTSTEPSEGSAPGTSTEPSEGSAP | |
| AE912 | MAEPAGSPTSTEEGTPGSGTASSSPGSSTPSGATGSPGASPGTSSTGSPGSPAGS | 100 |
| | PTSTEEGTSESATPESGPGTSTEPSEGSAPGSPAGSPTSTEEGTSTEPSEGSAPGT | |
| | STEPSEGSAPGTSESATPESGPGSEPATSGSETPGSEPATSGSETPGSPAGSPTST | |
| | EEGTSESATPESGPGTSTEPSEGSAPGTSTEPSEGSAPGSPAGSPTSTEEGTSTEP | |
| | SEGSAPGTSTEPSEGSAPGTSESATPESGPGTSTEPSEGSAPGTSESATPESGPGS | |
| | EPATSGSETPGTSTEPSEGSAPGTSTEPSEGSAPGTSESATPESGPGTSESATPES | |
| | GPGSPAGSPTSTEEGTSESATPESGPGSEPATSGSETPGTSESATPESGPGTSTEP | |
| | SEGSAPGTSTEPSEGSAPGTSTEPSEGSAPGTSTEPSEGSAPGTSTEPSEGSAPGT | |
| | STEPSEGSAPGSPAGSPTSTEEGTSTEPSEGSAPGTSESATPESGPGSEPATSGSE | |
| | TPGTSESATPESGPGSEPATSGSETPGTSESATPESGPGTSTEPSEGSAPGTSESA | |
| | TPESGPGSPAGSPTSTEEGSPAGSPTSTEEGSPAGSPTSTEEGTSESATPESGPGT | |
| | STEPSEGSAPGTSESATPESGPGSEPATSGSETPGTSESATPESGPGSEPATSGSE | |
| | TPGTSESATPESGPGTSTEPSEGSAPGSPAGSPTSTEEGTSESATPESGPGSEPAT | |
| | SGSETPGTSESATPESGPGSPAGSPTSTEEGSPAGSPTSTEEGTSTEPSEGSAPGT | |
| | SESATPESGPGTSESATPESGPGTSESATPESGPGSEPATSGSETPGSEPATSGSE | |
| | TPGSPAGSPTSTEEGTSTEPSEGSAPGTSTEPSEGSAPGSEPATSGSETPGTSESA | |
| | TPESGPGTSTEPSEGSAP | |
| AM923 | MAEPAGSPTSTEEGASPGTSSTGSPGSSTPSGATGSPGSSTPSGATGSPGTSTEPS | 101 |
| | EGSAPGSEPATSGSETPGSPAGSPTSTEEGSTSSTAESPGPGTSTPESGSASPGST | |
| | SESPSGTAPGSTSESPSGTAPGTSTPESGSASPGTSTPESGSASPGSEPATSGSETP | |
| | GTSESATPESGPGSPAGSPTSTEEGTSTEPSEGSAPGTSESATPESGPGTSTEPSE | |
| | GSAPGTSTEPSEGSAPGSPAGSPTSTEEGTSTEPSEGSAPGTSTEPSEGSAPGTSE | |
| | SATPESGPGTSESATPESGPGTSTEPSEGSAPGTSTEPSEGSAPGTSESATPESGP | |
| | GTSTEPSEGSAPGSEPATSGSETPGSPAGSPTSTEEGSSTPSGATGSPGTPGSGTA | |
| | SSSPGSSTPSGATGSPGTSTEPSEGSAPGTSTEPSEGSAPGSEPATSGSETPGSPA | |
| | GSPTSTEEGSPAGSPTSTEEGTSTEPSEGSAPGASASGAPSTGGTSESATPESGPG | |
| | SPAGSPTSTEEGSPAGSPTSTEEGSTSSTAESPGPGSTSESPSGTAPGTSPSGESST | |
| | APGTPGSGTASSSPGSSTPSGATGSPGSSPSASTGTGPGSEPATSGSETPGTSESA | |
| | TPESGPGSEPATSGSETPGSTSSTAESPGPGSTSSTAESPGPGTSPSGESSTAPGSE | |
| | PATSGSETPGSEPATSGSETPGTSTEPSEGSAPGSTSSTAESPGPGTSTPESGSASP | |
| | GSTSESPSGTAPGTSTEPSEGSAPGTSTEPSEGSAPGTSTEPSEGSAPGSSTPSGA | |
| | TGSPGSSPSASTGTGPGASPGTSSTGSPGSEPATSGSETPGTSESATPESGPGSPA | |
| | GSPTSTEEGSSTPSGATGSPGSSPSASTGTGPGASPGTSSTGSPGTSESATPESGP | |
| | GTSTEPSEGSAPGTSTEPSEGSAP | |
| AM1318 | GTSTEPSEGSAPGSEPATSGSETPGSPAGSPTSTEEGSTSSTAESPGPGTSTPESG | 102 |
| | SASPGSTSESPSGTAPGSTSESPSGTAPGTSTPESGSASPGTSTPESGSASPGSEPA | |
| | TSGSETPGTSESATPESGPGSPAGSPTSTEEGTSTEPSEGSAPGTSESATPESGPG | |
| | TSTEPSEGSAPGTSTEPSEGSAPGSPAGSPTSTEEGTSTEPSEGSAPGTSTEPSEGS | |
| | APGTSESATPESGPGTSESATPESGPGTSTEPSEGSAPGTSTEPSEGSAPGTSESA | |
| | TPESGPGTSTEPSEGSAPGSEPATSGSETPGSPAGSPTSTEEGSSTPSGATGSPGT | |
| | PGSGTASSSPGSSTPSGATGSPGTSTEPSEGSAPGTSTEPSEGSAPGSEPATSGSE | |
| | TPGSPAGSPTSTEEGSPAGSPTSTEEGTSTEPSEGSAPGPEPTGPAPSGGSEPATS | |
| | GSETPGTSESATPESGPGSPAGSPTSTEEGTSESATPESGPGSPAGSPTSTEEGSP | |
| | AGSPTSTEEGTSESATPESGPGSPAGSPTSTEEGSPAGSPTSTEEGSTSSTAESPG | |
| | PGSTSESPSGTAPGTSPSGESSTAPGSTSESPSGTAPGSTSESPSGTAPGTSPSGES | |
| | STAPGTSTEPSEGSAPGTSESATPESGPGTSESATPESGPGSEPATSGSETPGTSE | |
| | SATPESGPGTSESATPESGPGTSTEPSEGSAPGTSESATPESGPGTSTEPSEGSAP | |
| | GTSPSGESSTAPGTSPSGESSTAPGTSPSGESSTAPGTSTEPSEGSAPGSPAGSPTS | |
| | TEEGTSTEPSEGSAPGSSPSASTGTGPGSSTPSGATGSPGSSTPSGATGSPGSSTP | |
| | SGATGSPGSSTPSGATGSPGASPGTSSTGSPGASASGAPSTGGTSPSGESSTAPG | |
| | STSSTAESPGPGTSPSGESSTAPGTSESATPESGPGTSTEPSEGSAPGTSTEPSEGS | |
| | APGSSPSASTGTGPGSSTPSGATGSPGASPGTSSTGSPGTSTPESGSASPGTSPSG | |
| | ESSTAPGTSPSGESSTAPGTSESATPESGPGSEPATSGSETPGTSTEPSEGSAPGS | |
| | TSESPSGTAPGSTSESPSGTAPGTSTPESGSASPGSPAGSPTSTEEGTSESATPESG | |
| | PGTSTEPSEGSAPGSPAGSPTSTEEGTSESATPESGPGSEPATSGSETPGSSTPSG | |
| | ATGSPGASPGTSSTGSPGSSTPSGATGSPGSTSESPSGTAPGTSPSGESSTAPGST | |
| | SSTAESPGPGSSTPSGATGSPGASPGTSSTGSPGTPGSGTASSSPGSPAGSPTSTE | |
| | EGSPAGSPTSTEEGTSTEPSEGSAP | |
| BC 864 | GTSTEPSEPGSAGTSTEPSEPGSAGSEPATSGTEPSGSGASEPTSTEPGSEPATSG | 103 |
| | TEPSGSEPATSGTEPSGSEPATSGTEPSGSGASEPTSTEPGTSTEPSEPGSAGSEP | |
| | ATSGTEPSGTSTEPSEPGSAGSEPATSGTEPSGSEPATSGTEPSGTSTEPSEPGSA | |
| | GTSTEPSEPGSAGSEPATSGTEPSGSEPATSGTEPSGTSEPSTSEPGAGSGASEPT | |
| | STEPGTSEPSTSEPGAGSEPATSGTEPSGSEPATSGTEPSGTSTEPSEPGSAGTST | |
| | EPSEPGSAGSGASEPTSTEPGSEPATSGTEPSGSEPATSGTEPSGSEPATSGTEPS | |
| | GSEPATSGTEPSGTSTEPSEPGSAGSEPATSGTEPSGSGASEPTSTEPGTSTEPSEP | |
| | GSAGSEPATSGTEPSGSGASEPTSTEPGTSTEPSEPGSAGSGASEPTSTEPGSEPA | |
| | TSGTEPSGSGASEPTSTEPGSEPATSGTEPSGSGASEPTSTEPGTSTEPSEPGSAG | |
| | SEPATSGTEPSGSGASEPTSTEPGTSTEPSEPGSAGSEPATSGTEPSGTSTEPSEPG | |
| | SAGSEPATSGTEPSGTSTEPSEPGSAGTSTEPSEPGSAGTSTEPSEPGSAGTSTEP | |
| | SEPGSAGTSTEPSEPGSAGTSTEPSEPGSAGTSEPSTSEPGAGSGASEPTSTEPGT | |
| | STEPSEPGSAGTSTEPSEPGSAGTSTEPSEPGSAGSEPATSGTEPSGSGASEPTST | |
| | EPGSEPATSGTEPSGSEPATSGTEPSGSEPATSGTEPSGSEPATSGTEPSGTSEPST | |
| | SEPGAGSEPATSGTEPSGSGASEPTSTEPGTSTEPSEPGSAGSEPATSGTEPSGSG | |
| | ASEPTSTEPGTSTEPSEPGSA | |
| BD864 | GSETATSGSETAGTSESATSESGAGSTAGSETSTEAGTSESATSESGAGSETATS | 104 |
| | GSETAGSETATSGSETAGTSTEASEGSASGTSTEASEGSASGTSESATSESGAGS | |
| | ETATSGSETAGTSTEASEGSASGSTAGSETSTEAGTSESATSESGAGTSESATSE | |
| | SGAGSETATSGSETAGTSESATSESGAGTSTEASEGSASGSETATSGSETAGSET | |
| | ATSGSETAGTSTEASEGSASGSTAGSETSTEAGTSESATSESGAGTSTEASEGSA | |
| | SGSETATSGSETAGSTAGSETSTEAGSTAGSETSTEAGSETATSGSETAGTSESA | |
| | TSESGAGTSESATSESGAGSETATSGSETAGTSESATSESGAGTSESATSESGAG | |
| | SETATSGSETAGSETATSGSETAGTSTEASEGSASGSTAGSETSTEAGSETATSG | |
| | SETAGTSESATSESGAGSTAGSETSTEAGSTAGSETSTEAGSTAGSETSTEAGTS | |
| | TEASEGSASGSTAGSETSTEAGSTAGSETSTEAGTSTEASEGSASGSTAGSETST | |
| | EAGSETATSGSETAGTSTEASEGSASGTSESATSESGAGSETATSGSETAGTSES | |
| | ATSESGAGTSESATSESGAGSETATSGSETAGTSESATSESGAGSETATSGSETA | |
| | GTSTEASEGSASGTSTEASEGSASGSTAGSETSTEAGSTAGSETSTEAGSETATS | |
| | GSETAGTSESATSESGAGTSESATSESGAGSETATSGSETAGSETATSGSETAGS | |
| | ETATSGSETAGTSTEASEGSASGTSESATSESGAGSETATSGSETAGSETATSGS | |
| | ETAGTSESATSESGAGTSESATSESGAGSETATSGSETA | |
| AE948 | GTSTEPSEGSAPGTSESATPESGPGSEPATSGSETPGTSESATPESGPGTSTEPSE | 105 |
| | GSAPGSPAGSPTSTEEGTSTEPSEGSAPGSEPATSGSETPGTSESATPESGPGTSE | |
| | SATPESGPGSEPATSGSETPGTSTEPSEGSAPGTSESATPESGPGTSTEPSEGSAP | |
| | GTSTEPSEGSAPGSEPATSGSETPGTSTEPSEGSAPGSEPATSGSETPGSEPATSG | |
| | SETPGTSTEPSEGSAPGSEPATSGSETPGSEPATSGSETPGTSTEPSEGSAPGSEP | |
| | ATSGSETPGSPAGSPTSTEEGTSESATPESGPGTSTEPSEGSAPGSEPATSGSETP | |
| | GTSESATPESGPGSEPATSGSETPGSEPATSGSETPGTSESATPESGPGSPAGSPT | |
| | STEEGTSESATPESGPGSPAGSPTSTEEGTSTEPSEGSAPGTSESATPESGPGTST | |
| | EPSEGSAPGTSTEPSEGSAPGSPAGSPTSTEEGTSTEPSEGSAPGTSESATPESGP | |
| | GSPAGSPTSTEEGSPAGSPTSTEEGTSESATPESGPGTSESATPESGPGTSTEPSE | |
| | GSAPGSPAGSPTSTEEGTSESATPESGPGTSTEPSEGSAPGSEPATSGSETPGSPA | |
| | GSPTSTEEGTSESATPESGPGTSTEPSEGSAPGSEPATSGSETPGSEPATSGSETP | |
| | GSEPATSGSETPGSPAGSPTSTEEGTSESATPESGPGSEPATSGSETPGSEPATSG | |
| | SETPGSPAGSPTSTEEGSPAGSPTSTEEGSPAGSPTSTEEGTSESATPESGPGSEP | |
| | ATSGSETPGTSTEPSEGSAPGTSTEPSEGSAPGSPAGSPTSTEEGSPAGSPTSTEE | |
| | GSPAGSPTSTEEGTSTEPSEGSAPGTSESATPESGPGTSESATPESGPGTSTEPSE | |
| | GSAPGTSTEPSEGSAPGTSTEPSEGSAPGTSESATPESGPGTSESATPESGP | |
| AE1044 | GSEPATSGSETPGSEPATSGSETPGTSTEPSEGSAPGTSESATPESGPGSPAGSPT | 106 |
| | STEEGTSTEPSEGSAPGTSESATPESGPGTSESATPESGPGSEPATSGSETPGSEP | |
| | ATSGSETPGTSESATPESGPGTSESATPESGPGSPAGSPTSTEEGTSTEPSEGSAP | |
| | GSEPATSGSETPGTSTEPSEGSAPGSPAGSPTSTEEGSPAGSPTSTEEGSPAGSPT | |
| | STEEGTSTEPSEGSAPGTSESATPESGPGSEPATSGSETPGTSESATPESGPGTSE | |
| | SATPESGPGSPAGSPTSTEEGTSTEPSEGSAPGSEPATSGSETPGTSTEPSEGSAP | |
| | GTSESATPESGPGSPAGSPTSTEEGTSTEPSEGSAPGTSTEPSEGSAPGSPAGSPT | |
| | STEEGTSTEPSEGSAPGTSESATPESGPGSPAGSPTSTEEGTSESATPESGPGSEP | |
| | ATSGSETPGTSTEPSEGSAPGSEPATSGSETPGTSESATPESGPGTSTEPSEGSAP | |
| | GTSESATPESGPGTSTEPSEGSAPGTSTEPSEGSAPGSEPATSGSETPGSPAGSPT | |
| | STEEGTSESATPESGPGTSTEPSEGSAPGSPAGSPTSTEEGTSTEPSEGSAPGTSE | |
| | SATPESGPGTSTEPSEGSAPGSEPATSGSETPGSEPATSGSETPGTSESATPESGP | |
| | GTSESATPESGPGTSESATPESGPGTSTEPSEGSAPGTSTEPSEGSAPGSPAGSPT | |
| | STEEGSPAGSPTSTEEGTSESATPESGPGSPAGSPTSTEEGSPAGSPTSTEEGTSE | |
| | SATPESGPGSEPATSGSETPGTSTEPSEGSAPGSEPATSGSETPGSPAGSPTSTEE | |
| | GTSESATPESGPGTSESATPESGPGSEPATSGSETPGTSTEPSEGSAPGTSTEPSE | |
| | GSAPGSPAGSPTSTEEGTSTEPSEGSAPGTSTEPSEGSAPGSEPATSGSETPGSPA | |
| | GSPTSTEEGTSESATPESGPGTSTEPSEGSAPGSPAGSPTSTEEGTSESATPESGP | |
| | GTSESATPESGPGTST | |
| AE1140 | GSEPATSGSETPGSEPATSGSETPGTSTEPSEGSAPGSEPATSGSETPGTSESATP | 107 |
| | ESGPGSEPATSGSETPGSPAGSPTSTEEGTSESATPESGPGSEPATSGSETPGTST | |
| | EPSEGSAPGTSESATPESGPGTSESATPESGPGTSTEPSEGSAPGTSTEPSEGSAP | |
| | GSEPATSGSETPGSPAGSPTSTEEGTSTEPSEGSAPGSEPATSGSETPGSPAGSPT | |
| | STEEGTSTEPSEGSAPGTSESATPESGPGSPAGSPTSTEEGTSTEPSEGSAPGTSE | |
| | SATPESGPGSEPATSGSETPGTSESATPESGPGSEPATSGSETPGTSTEPSEGSAP | |
| | GTSTEPSEGSAPGTSTEPSEGSAPGSPAGSPTSTEEGSPAGSPTSTEEGTSESATP | |
| | ESGPGTSTEPSEGSAPGTSTEPSEGSAPGSPAGSPTSTEEGSPAGSPTSTEEGSPA | |
| | GSPTSTEEGTSESATPESGPGSEPATSGSETPGTSESATPESGPGSPAGSPTSTEE | |
| | GTSTEPSEGSAPGTSESATPESGPGSEPATSGSETPGSPAGSPTSTEEGTSTEPSE | |
| | GSAPGTSESATPESGPGTSESATPESGPGSPAGSPTSTEEGTSTEPSEGSAPGSPA | |
| | GSPTSTEEGSPAGSPTSTEEGTSESATPESGPGSEPATSGSETPGTSTEPSEGSAP | |
| | GSEPATSGSETPGTSESATPESGPGTSTEPSEGSAPGTSESATPESGPGTSESATP | |
| | ESGPGTSTEPSEGSAPGTSTEPSEGSAPGSEPATSGSETPGTSESATPESGPGTST | |
| | EPSEGSAPGSEPATSGSETPGSPAGSPTSTEEGTSESATPESGPGSPAGSPTSTEE | |
| | GTSTEPSEGSAPGSEPATSGSETPGSEPATSGSETPGSEPATSGSETPGTSESATP | |
| | ESGPGTSESATPESGPGTSTEPSEGSAPGTSTEPSEGSAPGSEPATSGSETPGTST | |
| | EPSEGSAPGTSESATPESGPGSPAGSPTSTEEGSPAGSPTSTEEGTSTEPSEGSAP | |
| | GSPAGSPTSTEEGSPA | |
| AE1236 | GSPAGSPTSTEEGTSTEPSEGSAPGSPAGSPTSTEEGTSESATPESGPGSEPATSG | 108 |
| | SETPGTSTEPSEGSAPGTSTEPSEGSAPGTSESATPESGPGTSTEPSEGSAPGTST | |
| | EPSEGSAPGSEPATSGSETPGSPAGSPTSTEEGTSESATPESGPGSPAGSPTSTEE | |
| | GTSTEPSEGSAPGSPAGSPTSTEEGTSTEPSEGSAPGSPAGSPTSTEEGTSTEPSE | |
| | GSAPGSPAGSPTSTEEGSPAGSPTSTEEGTSTEPSEGSAPGSEPATSGSETPGSPA | |
| | GSPTSTEEGTSESATPESGPGSEPATSGSETPGSEPATSGSETPGTSESATPESGP | |
| | GSPAGSPTSTEEGTSESATPESGPGSEPATSGSETPGSEPATSGSETPGTSESATP | |
| | ESGPGTSESATPESGPGTSTEPSEGSAPGTSTEPSEGSAPGTSESATPESGPGSPA | |
| | GSPTSTEEGTSTEPSEGSAPGSEPATSGSETPGSPAGSPTSTEEGTSTEPSEGSAP | |
| | GTSTEPSEGSAPGSPAGSPTSTEEGSPAGSPTSTEEGSPAGSPTSTEEGTSESATP | |
| | ESGPGSEPATSGSETPGTSESATPESGPGTSESATPESGPGTSTEPSEGSAPGTSE | |
| | SATPESGPGSPAGSPTSTEEGTSESATPESGPGTSESATPESGPGTSTEPSEGSAP | |
| | GSEPATSGSETPGTSTEPSEGSAPGSPAGSPTSTEEGTSESATPESGPGTSTEPSE | |
| | GSAPGTSTEPSEGSAPGSEPATSGSETPGSEPATSGSETPGTSESATPESGPGSEP | |
| | ATSGSETPGSPAGSPTSTEEGTSESATPESGPGSEPATSGSETPGTSTEPSEGSAP | |
| | GTSESATPESGPGTSESATPESGPGTSTEPSEGSAPGSEPATSGSETPGTSTEPSE | |
| | GSAPGSPAGSPTSTEEGSPAGSPTSTEEGTSESATPESGPGSEPATSGSETPGSPA | |
| | GSPTSTEEGSPAGSPTSTEEGTSESATPESGPGSEPATSGSETPGTSTEPSEGSAP | |
| | GTSTEPSEGSAPGSEP | |
| AE1332 | GSPAGSPTSTEEGTSTEPSEGSAPGTSESATPESGPGTSESATPESGPGSEPATSG | 109 |
| | SETPGTSTEPSEGSAPGTSESATPESGPGSPAGSPTSTEEGTSTEPSEGSAPGTSES | |
| | ATPESGPGSPAGSPTSTEEGTSTEPSEGSAPGTSESATPESGPGTSTEPSEGSAPG | |
| | SEPATSGSETPGSEPATSGSETPGSEPATSGSETPGTSESATPESGPGSPAGSPTS | |
| | TEEGTSESATPESGPGSEPATSGSETPGTSESATPESGPGTSESATPESGPGSPAG | |
| | SPTSTEEGTSTEPSEGSAPGTSESATPESGPGTSTEPSEGSAPGTSTEPSEGSAPG | |
| | TSTEPSEGSAPGSEPATSGSETPGTSTEPSEGSAPGTSESATPESGPGTSESATPES | |
| | GPGTSTEPSEGSAPGTSESATPESGPGTSESATPESGPGSEPATSGSETPGTSTEP | |
| | SEGSAPGTSESATPESGPGSPAGSPTSTEEGSPAGSPTSTEEGTSTEPSEGSAPGS | |
| | EPATSGSETPGSEPATSGSETPGTSTEPSEGSAPGSEPATSGSETPGSPAGSPTST | |
| | EEGTSESATPESGPGSEPATSGSETPGSEPATSGSETPGTSESATPESGPGTSESA | |
| | TPESGPGTSTEPSEGSAPGSPAGSPTSTEEGTSESATPESGPGTSTEPSEGSAPGS | |
| | EPATSGSETPGSPAGSPTSTEEGTSTEPSEGSAPGTSTEPSEGSAPGSEPATSGSE | |
| | TPGTSESATPESGPGTSTEPSEGSAPGSPAGSPTSTEEGTSESATPESGPGTSESA | |
| | TPESGPGTSTEPSEGSAPGSEPATSGSETPGSEPATSGSETPGTSTEPSEGSAPGT | |
| | SESATPESGPGSPAGSPTSTEEGTSTEPSEGSAPGTSTEPSEGSAPGSPAGSPTST | |
| | EEGSPAGSPTSTEEGTSTEPSEGSAPGSEPATSGSETPGSPAGSPTSTEEGTSESA | |
| | TPESGPGSEPATSGSETPGSEPATSGSETPGTSESATPESGPGTSESATPESGPGT | |
| | STEPSEGSAPGTST | |
| AE1428 | GSEPATSGSETPGSPAGSPTSTEEGTSTEPSEGSAPGSEPATSGSETPGTSESATP | 110 |
| | ESGPGTSTEPSEGSAPGTSESATPESGPGSPAGSPTSTEEGTSTEPSEGSAPGTST | |
| | EPSEGSAPGSPAGSPTSTEEGTSTEPSEGSAPGTSESATPESGPGSEPATSGSETP | |
| | GTSESATPESGPGSEPATSGSETPGTSTEPSEGSAPGTSTEPSEGSAPGSEPATSG | |
| | SETPGTSTEPSEGSAPGTSTEPSEGSAPGSPAGSPTSTEEGTSTEPSEGSAPGTSES | |
| | ATPESGPGTSESATPESGPGTSTEPSEGSAPGTSTEPSEGSAPGSPAGSPTSTEEG | |
| | SPAGSPTSTEEGTSTEPSEGSAPGSEPATSGSETPGSPAGSPTSTEEGTSTEPSEGS | |
| | APGSPAGSPTSTEEGSPAGSPTSTEEGTSESATPESGPGSEPATSGSETPGSEPAT | |
| | SGSETPGTSTEPSEGSAPGSPAGSPTSTEEGSPAGSPTSTEEGTSESATPESGPGS | |
| | EPATSGSETPGSEPATSGSETPGTSESATPESGPGSEPATSGSETPGSEPATSGSE | |
| | TPGTSESATPESGPGTSESATPESGPGTSESATPESGPGTSESATPESGPGSPAGS | |
| | PTSTEEGTSTEPSEGSAPGTSESATPESGPGTSTEPSEGSAPGTSTEPSEGSAPGT | |
| | SESATPESGPGTSTEPSEGSAPGTSESATPESGPGSPAGSPTSTEEGTSTEPSEGS | |
| | APGSEPATSGSETPGTSTEPSEGSAPGSEPATSGSETPGTSTEPSEGSAPGTSTEP | |
| | SEGSAPGSPAGSPTSTEEGTSESATPESGPGTSTEPSEGSAPGSEPATSGSETPGT | |
| | SESATPESGPGTSESATPESGPGTSESATPESGPGTSTEPSEGSAPGSEPATSGSE | |
| | TPGSPAGSPTSTEEGTSESATPESGPGTSTEPSEGSAPGTSTEPSEGSAPGSPAGS | |
| | PTSTEEGTSESATPESGPGTSTEPSEGSAPGTSTEPSEGSAPGSPAGSPTSTEEGT | |
| | SESATPESGPGSPA | |
| AE1524 | GTSTEPSEGSAPGTSTEPSEGSAPGTSTEPSEGSAPGTSTEPSEGSAPGSPAGSPT | 111 |
| | STEEGSPAGSPTSTEEGTSESATPESGPGSEPATSGSETPGTSTEPSEGSAPGTSE | |
| | SATPESGPGTSTEPSEGSAPGTSESATPESGPGTSESATPESGPGSPAGSPTSTEE | |
| | GTSTEPSEGSAPGSEPATSGSETPGTSTEPSEGSAPGSPAGSPTSTEEGTSTEPSE | |
| | GSAPGSPAGSPTSTEEGSPAGSPTSTEEGSPAGSPTSTEEGTSESATPESGPGSEP | |
| | ATSGSETPGTSESATPESGPGTSESATPESGPGSPAGSPTSTEEGTSTEPSEGSAP | |
| | GSEPATSGSETPGTSTEPSEGSAPGSPAGSPTSTEEGSPAGSPTSTEEGTSTEPSE | |
| | GSAPGSEPATSGSETPGSPAGSPTSTEEGTSESATPESGPGSEPATSGSETPGSPA | |
| | GSPTSTEEGTSESATPESGPGTSESATPESGPGTSTEPSEGSAPGSEPATSGSETP | |
| | GSEPATSGSETPGTSESATPESGPGSEPATSGSETPGTSTEPSEGSAPGSPAGSPT | |
| | STEEGTSTEPSEGSAPGSEPATSGSETPGSEPATSGSETPGSPAGSPTSTEEGTSE | |
| | SATPESGPGTSTEPSEGSAPGSPAGSPTSTEEGSPAGSPTSTEEGTSESATPESGP | |
| | GSPAGSPTSTEEGTSTEPSEGSAPGSEPATSGSETPGSEPATSGSETPGSEPATSG | |
| | SETPGTSESATPESGPGTSESATPESGPGTSTEPSEGSAPGTSTEPSEGSAPGSEP | |
| | ATSGSETPGTSTEPSEGSAPGTSESATPESGPGSPAGSPTSTEEGSPAGSPTSTEE | |
| | GTSTEPSEGSAPGTSESATPESGPGSPAGSPTSTEEGTSTEPSEGSAPGSEPATSG | |
| | SETPGTSESATPESGPGSEPATSGSETPGTSESATPESGPGSEPATSGSETPGSEP | |
| | ATSGSETPGTSTEPSEGSAPGTSESATPESGPGTSTEPSEGSAPGTSTEPSEGSAP | |
| | GTSESATPESGPGSPA | |
| AE1620 | GSEPATSGSETPGTSTEPSEGSAPGSEPATSGSETPGTSTEPSEGSAPGTSESATP | 112 |
| | ESGPGTSESATPESGPGSEPATSGSETPGTSTEPSEGSAPGTSTEPSEGSAPGTSE | |
| | SATPESGPGTSTEPSEGSAPGTSTEPSEGSAPGSEPATSGSETPGSPAGSPTSTEE | |
| | GTSESATPESGPGTSESATPESGPGTSTEPSEGSAPGTSESATPESGPGSEPATSG | |
| | SETPGTSESATPESGPGTSESATPESGPGTSTEPSEGSAPGTSTEPSEGSAPGSEP | |
| | ATSGSETPGSPAGSPTSTEEGTSESATPESGPGSEPATSGSETPGSEPATSGSETP | |
| | GTSESATPESGPGTSESATPESGPGSPAGSPTSTEEGTSTEPSEGSAPGTSESATP | |
| | ESGPGTSTEPSEGSAPGTSTEPSEGSAPGTSESATPESGPGTSTEPSEGSAPGSPA | |
| | GSPTSTEEGSPAGSPTSTEEGTSESATPESGPGSEPATSGSETPGSEPATSGSETP | |
| | GTSTEPSEGSAPGTSESATPESGPGSPAGSPTSTEEGSPAGSPTSTEEGTSTEPSE | |
| | GSAPGSPAGSPTSTEEGSPAGSPTSTEEGTSESATPESGPGSEPATSGSETPGTST | |
| | EPSEGSAPGTSTEPSEGSAPGSEPATSGSETPGSPAGSPTSTEEGTSESATPESGP | |
| | GSPAGSPTSTEEGTSTEPSEGSAPGTSESATPESGPGSEPATSGSETPGTSESATP | |
| | ESGPGTSESATPESGPGSPAGSPTSTEEGTSTEPSEGSAPGSEPATSGSETPGSPA | |
| | GSPTSTEEGTSTEPSEGSAPGSEPATSGSETPGSEPATSGSETPGTSESATPESGP | |
| | GTSESATPESGPGTSTEPSEGSAPGTSESATPESGPGSEPATSGSETPGTSESATP | |
| | ESGPGTSESATPESGPGTSTEPSEGSAPGTSESATPESGPGSEPATSGSETPGTST | |
| | EPSEGSAPGSPAGSPTSTEEGTSESATPESGPGTSTEPSEGSAPGTSTEPSEGSAP | |
| | GSPAGSPTSTEEGTST | |
| AE1716 | GTSESATPESGPGTSTEPSEGSAPGTSESATPESGPGTSTEPSEGSAPGSEPATSG | 113 |
| | SETPGSPAGSPTSTEEGTSESATPESGPGSEPATSGSETPGSEPATSGSETPGTSES | |
| | ATPESGPGTSESATPESGPGTSTEPSEGSAPGSEPATSGSETPGSEPATSGSETPG | |
| | TSESATPESGPGTSESATPESGPGSEPATSGSETPGTSESATPESGPGSPAGSPTS | |
| | TEEGSPAGSPTSTEEGTSTEPSEGSAPGSEPATSGSETPGSPAGSPTSTEEGTSES | |
| | ATPESGPGSPAGSPTSTEEGTSTEPSEGSAPGSEPATSGSETPGSPAGSPTSTEEG | |
| | TSESATPESGPGSPAGSPTSTEEGSPAGSPTSTEEGTSTEPSEGSAPGSEPATSGS | |
| | ETPGSPAGSPTSTEEGTSESATPESGPGTSTEPSEGSAPGSPAGSPTSTEEGTSES | |
| | ATPESGPGSEPATSGSETPGTSTEPSEGSAPGSPAGSPTSTEEGTSTEPSEGSAPG | |
| | TSESATPESGPGTSESATPESGPGTSTEPSEGSAPGTSTEPSEGSAPGSEPATSGS | |
| | ETPGTSESATPESGPGTSESATPESGPGTSTEPSEGSAPGTSTEPSEGSAPGSPAG | |
| | SPTSTEEGSPAGSPTSTEEGTSTEPSEGSAPGSEPATSGSETPGSEPATSGSETPG | |
| | TSESATPESGPGSPAGSPTSTEEGTSESATPESGPGTSTEPSEGSAPGTSTEPSEGS | |
| | APGSPAGSPTSTEEGSPAGSPTSTEEGTSESATPESGPGSPAGSPTSTEEGTSTEP | |
| | SEGSAPGSEPATSGSETPGSPAGSPTSTEEGSPAGSPTSTEEGTSTEPSEGSAPGT | |
| | SESATPESGPGTSESATPESGPGSPAGSPTSTEEGTSTEPSEGSAPGSPAGSPTST | |
| | EEGTSTEPSEGSAPGSPAGSPTSTEEGTSTEPSEGSAPGTSTEPSEGSAPGSEPAT | |
| | SGSETPGSPAGSPTSTEEGTSESATPESGPGSEPATSGSETPGSPAGSPTSTEEGT | |
| | SESATPESGPGTSE | |
| AE1812 | GTSESATPESGPGSPAGSPTSTEEGSPAGSPTSTEEGTSESATPESGPGSEPATSG | 114 |
| | SETPGTSTEPSEGSAPGTSTEPSEGSAPGTSTEPSEGSAPGSPAGSPTSTEEGTST | |
| | EPSEGSAPGTSESATPESGPGTSESATPESGPGSPAGSPTSTEEGSPAGSPTSTEE | |
| | GSPAGSPTSTEEGTSESATPESGPGSEPATSGSETPGTSESATPESGPGTSTEPSE | |
| | GSAPGTSESATPESGPGTSTEPSEGSAPGTSTEPSEGSAPGTSESATPESGPGSPA | |
| | GSPTSTEEGTSESATPESGPGTSTEPSEGSAPGSPAGSPTSTEEGTSESATPESGP | |
| | GSEPATSGSETPGTSTEPSEGSAPGSEPATSGSETPGSEPATSGSETPGTSESATP | |
| | ESGPGTSESATPESGPGTSTEPSEGSAPGTSESATPESGPGSPAGSPTSTEEGTST | |
| | EPSEGSAPGSEPATSGSETPGTSESATPESGPGSEPATSGSETPGTSTEPSEGSAP | |
| | GTSESATPESGPGSPAGSPTSTEEGSPAGSPTSTEEGSPAGSPTSTEEGTSESATP | |
| | ESGPGSEPATSGSETPGTSESATPESGPGTSESATPESGPGSEPATSGSETPGTST | |
| | EPSEGSAPGTSTEPSEGSAPGTSTEPSEGSAPGTSESATPESGPGSEPATSGSETP | |
| | GTSESATPESGPGSEPATSGSETPGTSTEPSEGSAPGSEPATSGSETPGSPAGSPT | |
| | STEEGTSESATPESGPGTSESATPESGPGTSESATPESGPGSPAGSPTSTEEGTST | |
| | EPSEGSAPGTSESATPESGPGTSESATPESGPGTSTEPSEGSAPGTSTEPSEGSAP | |
| | GSPAGSPTSTEEGTSESATPESGPGSEPATSGSETPGTSESATPESGPGTSESATP | |
| | ESGPGTSTEPSEGSAPGSEPATSGSETPGTSESATPESGPGSPAGSPTSTEEGTST | |
| | EPSEGSAPGSEPATSGSETPGSPAGSPTSTEEGTSESATPESGPGSPAGSPTSTEE | |
| | GTSTEPSEGSAPGSEP | |
| AE1908 | GSEPATSGSETPGTSTEPSEGSAPGTSESATPESGPGSEPATSGSETPGTSTEPSE | 115 |
| | GSAPGSPAGSPTSTEEGTSESATPESGPGSPAGSPTSTEEGTSTEPSEGSAPGSEP | |
| | ATSGSETPGTSTEPSEGSAPGTSESATPESGPGSEPATSGSETPGSEPATSGSETP | |
| | GTSESATPESGPGTSTEPSEGSAPGTSESATPESGPGTSESATPESGPGSPAGSPT | |
| | STEEGSPAGSPTSTEEGTSESATPESGPGTSESATPESGPGTSTEPSEGSAPGTST | |
| | EPSEGSAPGSPAGSPTSTEEGTSTEPSEGSAPGSEPATSGSETPGSEPATSGSETP | |
| | GSEPATSGSETPGSEPATSGSETPGTSESATPESGPGTSESATPESGPGTSESATP | |
| | ESGPGTSTEPSEGSAPGTSESATPESGPGTSESATPESGPGTSTEPSEGSAPGSPA | |
| | GSPTSTEEGTSTEPSEGSAPGSEPATSGSETPGSPAGSPTSTEEGTSESATPESGP | |
| | GTSTEPSEGSAPGSEPATSGSETPGTSESATPESGPGTSESATPESGPGTSTEPSE | |
| | GSAPGSEPATSGSETPGSPAGSPTSTEEGTSESATPESGPGTSESATPESGPGTST | |
| | EPSEGSAPGSEPATSGSETPGSPAGSPTSTEEGTSESATPESGPGSEPATSGSETP | |
| | GTSTEPSEGSAPGSEPATSGSETPGSPAGSPTSTEEGTSESATPESGPGTSTEPSE | |
| | GSAPGSEPATSGSETPGTSESATPESGPGTSESATPESGPGSPAGSPTSTEEGTST | |
| | EPSEGSAPGSPAGSPTSTEEGSPAGSPTSTEEGSPAGSPTSTEEGTSESATPESGP | |
| | GSEPATSGSETPGTSTEPSEGSAPGTSTEPSEGSAPGTSESATPESGPGTSTEPSE | |
| | GSAPGTSESATPESGPGSEPATSGSETPGTSTEPSEGSAPGTSESATPESGPGSPA | |
| | GSPTSTEEGSPAGSPTSTEEGSPAGSPTSTEEGTSESATPESGPGSPAGSPTSTEE | |
| | GTSESATPESGPGSEP | |
| AE2004A | GTSTEPSEGSAPGSEPATSGSETPGTSTEPSEGSAPGTSTEPSEGSAPGSEPATSG | 116 |
| | SETPGSPAGSPTSTEEGSPAGSPTSTEEGTSESATPESGPGSEPATSGSETPGTST | |
| | EPSEGSAPGTSTEPSEGSAPGSPAGSPTSTEEGTSESATPESGPGTSESATPESGP | |
| | GSPAGSPTSTEEGTSTEPSEGSAPGTSESATPESGPGTSTEPSEGSAPGSEPATSG | |
| | SETPGTSESATPESGPGSEPATSGSETPGTSTEPSEGSAPGTSTEPSEGSAPGSPA | |
| | GSPTSTEEGSPAGSPTSTEEGTSESATPESGPGSPAGSPTSTEEGTSTEPSEGSAP | |
| | GSEPATSGSETPGSEPATSGSETPGSPAGSPTSTEEGTSESATPESGPGTSTEPSE | |
| | GSAPGSEPATSGSETPGTSESATPESGPGSEPATSGSETPGSPAGSPTSTEEGTSE | |
| | SATPESGPGTSESATPESGPGSEPATSGSETPGTSESATPESGPGTSESATPESGP | |
| | GTSESATPESGPGTSTEPSEGSAPGTSESATPESGPGSEPATSGSETPGTSTEPSE | |
| | GSAPGSPAGSPTSTEEGTSTEPSEGSAPGSEPATSGSETPGSPAGSPTSTEEGTSE | |
| | SATPESGPGTSESATPESGPGTSTEPSEGSAPGTSESATPESGPGTSTEPSEGSAP | |
| | GTSESATPESGPGSEPATSGSETPGTSTEPSEGSAPGTSTEPSEGSAPGSPAGSPT | |
| | STEEGSPAGSPTSTEEGTSESATPESGPGTSTEPSEGSAPGTSESATPESGPGSPA | |
| | GSPTSTEEGSPAGSPTSTEEGSPAGSPTSTEEGTSTEPSEGSAPGSPAGSPTSTEE | |
| | GSPAGSPTSTEEGTSESATPESGPGSEPATSGSETPGSEPATSGSETPGTSESATP | |
| | ESGPGSEPATSGSETPGTSESATPESGPGTSTEPSEGSAPGTSTEPSEGSAPGSPA | |
| | GSPTSTEEGSPAGSPTSTEEGTSESATPESGPGSPAGSPTSTEEGTSTEPSEGSAP | |
| | GTSESATPESGPGTSE | |
| AG948 | GSSTPSGATGSPGTPGSGTASSSPGASPGTSSTGSPGSSPSASTGTGPGTPGSGT | 117 |
| | ASSSPGTPGSGTASSSPGTPGSGTASSSPGSSPSASTGTGPGTPGSGTASSSPGSS | |
| | PSASTGTGPGSSTPSGATGSPGSSTPSGATGSPGSSPSASTGTGPGSSTPSGATGS | |
| | PGASPGTSSTGSPGASPGTSSTGSPGSSPSASTGTGPGSSPSASTGTGPGASPGTS | |
| | STGSPGSSPSASTGTGPGASPGTSSTGSPGSSPSASTGTGPGASPGTSSTGSPGTP | |
| | GSGTASSSPGTPGSGTASSSPGSSTPSGATGSPGSSTPSGATGSPGSSTPSGATGS | |
| | PGASPGTSSTGSPGSSPSASTGTGPGASPGTSSTGSPGASPGTSSTGSPGSSTPSG | |
| | ATGSPGSSPSASTGTGPGSSPSASTGTGPGTPGSGTASSSPGASPGTSSTGSPGTP | |
| | GSGTASSSPGSSTPSGATGSPGSSTPSGATGSPGSSPSASTGTGPGSSPSASTGTG | |
| | PGSSTPSGATGSPGASPGTSSTGSPGTPGSGTASSSPGSSPSASTGTGPGSSTPSG | |
| | ATGSPGASPGTSSTGSPGSSTPSGATGSPGTPGSGTASSSPGSSPSASTGTGPGSS | |
| | TPSGATGSPGASPGTSSTGSPGASPGTSSTGSPGTPGSGTASSSPGTPGSGTASSS | |
| | PGSSPSASTGTGPGASPGTSSTGSPGASPGTSSTGSPGTPGSGTASSSPGTPGSGT | |
| | ASSSPGSSTPSGATGSPGSSPSASTGTGPGSSTPSGATGSPGSSPSASTGTGPGSS | |
| | PSASTGTGPGTPGSGTASSSPGSSTPSGATGSPGASPGTSSTGSPGTPGSGTASSS | |
| | PGTPGSGTASSSPGSSTPSGATGSPGTPGSGTASSSPGASPGTSSTGSPGSSTPSG | |
| | ATGSPGSSTPSGATGSPGTPGSGTASSSPGSSTPSGATGSPGSSTPSGATGSP | |
| AG1044 | GTPGSGTASSSPGTPGSGTASSSPGSSPSASTGTGPGTPGSGTASSSPGASPGTSS | 118 |
| | TGSPGTPGSGTASSSPGSSPSASTGTGPGSSTPSGATGSPGASPGTSSTGSPGASP | |
| | GTSSTGSPGSSPSASTGTGPGSSTPSGATGSPGSSPSASTGTGPGSSPSASTGTGP | |
| | GTPGSGTASSSPGTPGSGTASSSPGASPGTSSTGSPGSSTPSGATGSPGSSPSAST | |
| | GTGPGTPGSGTASSSPGASPGTSSTGSPGTPGSGTASSSPGSSPSASTGTGPGSSP | |
| | SASTGTGPGASPGTSSTGSPGASPGTSSTGSPGSSTPSGATGSPGSSTPSGATGSP | |
| | GTPGSGTASSSPGSSPSASTGTGPGSSTPSGATGSPGASPGTSSTGSPGSSTPSGA | |
| | TGSPGSSTPSGATGSPGSSPSASTGTGPGASPGTSSTGSPGTPGSGTASSSPGASP | |
| | GTSSTGSPGSSPSASTGTGPGTPGSGTASSSPGASPGTSSTGSPGASPGTSSTGSP | |
| | GSSTPSGATGSPGTPGSGTASSSPGSSTPSGATGSPGASPGTSSTGSPGTPGSGT | |
| | ASSSPGTPGSGTASSSPGSSTPSGATGSPGSSTPSGATGSPGTPGSGTASSSPGSS | |
| | TPSGATGSPGSSTPSGATGSPGASPGTSSTGSPGSSPSASTGTGPGSSPSASTGTG | |
| | PGASPGTSSTGSPGASPGTSSTGSPGTPGSGTASSSPGSSPSASTGTGPGTPGSGT | |
| | ASSSPGSSTPSGATGSPGSSTPSGATGSPGASPGTSSTGSPGSSPSASTGTGPGAS | |
| | PGTSSTGSPGSSPSASTGTGPGSSPSASTGTGPGASPGTSSTGSPGASPGTSSTGS | |
| | PGSSTPSGATGSPGASPGTSSTGSPGASPGTSSTGSPGTPGSGTASSSPGTPGSGT | |
| | ASSSPGTPGSGTASSSPGSSTPSGATGSPGSSTPSGATGSPGSSPSASTGTGPGSS | |
| | PSASTGTGPGTPGSGTASSSPGSSPSASTGTGPGASPGTSSTGSPGSSTPSGATGS | |
| | PGTPGSGTASSSPGSST | |
| AG1140 | GASPGTSSTGSPGSSPSASTGTGPGSSTPSGATGSPGASPGTSSTGSPGASPGTSS | 119 |
| | TGSPGSSTPSGATGSPGTPGSGTASSSPGASPGTSSTGSPGTPGSGTASSSPGTPG | |
| | SGTASSSPGSSTPSGATGSPGSSTPSGATGSPGTPGSGTASSSPGSSTPSGATGSP | |
| | GSSTPSGATGSPGSSPSASTGTGPGSSPSASTGTGPGASPGTSSTGSPGTPGSGT | |
| | ASSSPGASPGTSSTGSPGSSTPSGATGSPGTPGSGTASSSPGSSPSASTGTGPGSS | |
| | TPSGATGSPGSSPSASTGTGPGSSTPSGATGSPGASPGTSSTGSPGSSPSASTGTG | |
| | PGTPGSGTASSSPGASPGTSSTGSPGSSTPSGATGSPGASPGTSSTGSPGSSPSAS | |
| | TGTGPGTPGSGTASSSPGTPGSGTASSSPGASPGTSSTGSPGTPGSGTASSSPGTP | |
| | GSGTASSSPGSSPSASTGTGPGASPGTSSTGSPGSSTPSGATGSPGASPGTSSTGS | |
| | PGSSPSASTGTGPGTPGSGTASSSPGSSPSASTGTGPGSSPSASTGTGPGASPGTS | |
| | STGSPGASPGTSSTGSPGTPGSGTASSSPGASPGTSSTGSPGASPGTSSTGSPGTP | |
| | GSGTASSSPGTPGSGTASSSPGSSTPSGATGSPGSSTPSGATGSPGTPGSGTASSS | |
| | PGSSPSASTGTGPGTPGSGTASSSPGSSTPSGATGSPGSSTPSGATGSPGASPGTS | |
| | STGSPGTPGSGTASSSPGASPGTSSTGSPGSSTPSGATGSPGSSTPSGATGSPGTP | |
| | GSGTASSSPGSSTPSGATGSPGSSTPSGATGSPGASPGTSSTGSPGSSPSASTGTG | |
| | PGSSTPSGATGSPGSSTPSGATGSPGSSPSASTGTGPGSSPSASTGTGPGSSTPSG | |
| | ATGSPGASPGTSSTGSPGSSPSASTGTGPGTPGSGTASSSPGASPGTSSTGSPGSS | |
| | PSASTGTGPGASPGTSSTGSPGSSTPSGATGSPGSSPSASTGTGPGSSPSASTGTG | |
| | PGASPGTSSTGSPGSST | |
| AG1236 | GSSPSASTGTGPGTPGSGTASSSPGSSPSASTGTGPGSSPSASTGTGPGTPGSGT | 120 |
| | ASSSPGASPGTSSTGSPGSSTPSGATGSPGTPGSGTASSSPGASPGTSSTGSPGTP | |
| | GSGTASSSPGTPGSGTASSSPGSSPSASTGTGPGSSPSASTGTGPGSSTPSGATGS | |
| | PGASPGTSSTGSPGSSPSASTGTGPGTPGSGTASSSPGTPGSGTASSSPGSSTPSG | |
| | ATGSPGASPGTSSTGSPGSSPSASTGTGPGTPGSGTASSSPGTPGSGTASSSPGAS | |
| | PGTSSTGSPGSSTPSGATGSPGSSTPSGATGSPGSSPSASTGTGPGSSPSASTGTG | |
| | PGASPGTSSTGSPGSSPSASTGTGPGSSTPSGATGSPGASPGTSSTGSPGASPGTS | |
| | STGSPGSSTPSGATGSPGSSPSASTGTGPGASPGTSSTGSPGASPGTSSTGSPGTP | |
| | GSGTASSSPGSSTPSGATGSPGASPGTSSTGSPGSSTPSGATGSPGTPGSGTASSS | |
| | PGSSPSASTGTGPGSSTPSGATGSPGTPGSGTASSSPGSSTPSGATGSPGSSTPSG | |
| | ATGSPGASPGTSSTGSPGSSPSASTGTGPGSSPSASTGTGPGASPGTSSTGSPGSS | |
| | PSASTGTGPGTPGSGTASSSPGTPGSGTASSSPGASPGTSSTGSPGTPGSGTASSS | |
| | PGASPGTSSTGSPGTPGSGTASSSPGASPGTSSTGSPGSSTPSGATGSPGASPGTS | |
| | STGSPGSSPSASTGTGPGTPGSGTASSSPGTPGSGTASSSPGSSPSASTGTGPGTP | |
| | GSGTASSSPGASPGTSSTGSPGSSTPSGATGSPGTPGSGTASSSPGASPGTSSTGS | |
| | PGTPGSGTASSSPGTPGSGTASSSPGSSTPSGATGSPGTPGSGTASSSPGSSPSAS | |
| | TGTGPGSSTPSGATGSPGTPGSGTASSSPGSSTPSGATGSPGSSTPSGATGSPGSS | |
| | PSASTGTGPGASPGTSSTGSPGTPGSGTASSSPGSSPSASTGTGPGSSPSASTGTG | |
| | PGASPGTSSTGSPGASP | |
| AG1332 | GSSTPSGATGSPGSSPSASTGTGPGTPGSGTASSSPGSSPSASTGTGPGASPGTSS | 121 |
| | TGSPGSSPSASTGTGPGTPGSGTASSSPGASPGTSSTGSPGSSTPSGATGSPGSSP | |
| | SASTGTGPGSSTPSGATGSPGASPGTSSTGSPGTPGSGTASSSPGASPGTSSTGSP | |
| | GSSTPSGATGSPGSSTPSGATGSPGSSPSASTGTGPGTPGSGTASSSPGSSTPSGA | |
| | TGSPGSSTPSGATGSPGSSPSASTGTGPGTPGSGTASSSPGASPGTSSTGSPGTPG | |
| | SGTASSSPGASPGTSSTGSPGASPGTSSTGSPGTPGSGTASSSPGTPGSGTASSSP | |
| | GSSTPSGATGSPGSSTPSGATGSPGSSTPSGATGSPGASPGTSSTGSPGSSPSAST | |
| | GTGPGSSTPSGATGSPGSSPSASTGTGPGSSTPSGATGSPGTPGSGTASSSPGSSP | |
| | SASTGTGPGSSTPSGATGSPGASPGTSSTGSPGASPGTSSTGSPGSSPSASTGTGP | |
| | GASPGTSSTGSPGSSTPSGATGSPGASPGTSSTGSPGTPGSGTASSSPGTPGSGT | |
| | ASSSPGSSPSASTGTGPGTPGSGTASSSPGSSTPSGATGSPGSSPSASTGTGPGSS | |
| | TPSGATGSPGTPGSGTASSSPGTPGSGTASSSPGSSPSASTGTGPGSSTPSGATGS | |
| | PGSSTPSGATGSPGSSPSASTGTGPGSSPSASTGTGPGASPGTSSTGSPGASPGTS | |
| | STGSPGSSTPSGATGSPGASPGTSSTGSPGSSPSASTGTGPGTPGSGTASSSPGAS | |
| | PGTSSTGSPGASPGTSSTGSPGTPGSGTASSSPGTPGSGTASSSPGSSPSASTGTG | |
| | PGTPGSGTASSSPGASPGTSSTGSPGSSTPSGATGSPGTPGSGTASSSPGTPGSGT | |
| | ASSSPGSSTPSGATGSPGSSTPSGATGSPGTPGSGTASSSPGSSPSASTGTGPGSS | |
| | PSASTGTGPGASPGTSSTGSPGSSPSASTGTGPGSSPSASTGTGPGASPGTSSTGS | |
| | PGASPGTSSTGSPGTPG | |
| AG1428 | GTPGSGTASSSPGSSTPSGATGSPGASPGTSSTGSPGSSTPSGATGSPGTPGSGT | 122 |
| | ASSSPGTPGSGTASSSPGSSTPSGATGSPGSSTPSGATGSPGASPGTSSTGSPGSS | |
| | PSASTGTGPGSSTPSGATGSPGASPGTSSTGSPGSSPSASTGTGPGTPGSGTASSS | |
| | PGASPGTSSTGSPGASPGTSSTGSPGTPGSGTASSSPGTPGSGTASSSPGASPGTS | |
| | STGSPGASPGTSSTGSPGTPGSGTASSSPGTPGSGTASSSPGSSPSASTGTGPGSS | |
| | PSASTGTGPGASPGTSSTGSPGSSPSASTGTGPGSSPSASTGTGPGASPGTSSTGS | |
| | PGASPGTSSTGSPGTPGSGTASSSPGTPGSGTASSSPGSSPSASTGTGPGASPGTS | |
| | STGSPGSSTPSGATGSPGASPGTSSTGSPGSSPSASTGTGPGSSTPSGATGSPGSS | |
| | PSASTGTGPGSSPSASTGTGPGASPGTSSTGSPGSSPSASTGTGPGSSPSASTGTG | |
| | PGASPGTSSTGSPGASPGTSSTGSPGSSPSASTGTGPGTPGSGTASSSPGASPGTS | |
| | STGSPGSSTPSGATGSPGTPGSGTASSSPGTPGSGTASSSPGSSPSASTGTGPGSS | |
| | TPSGATGSPGASPGTSSTGSPGASPGTSSTGSPGSSTPSGATGSPGSSPSASTGTG | |
| | PGASPGTSSTGSPGSSTPSGATGSPGTPGSGTASSSPGASPGTSSTGSPGTPGSGT | |
| | ASSSPGASPGTSSTGSPGSSTPSGATGSPGSSTPSGATGSPGASPGTSSTGSPGSS | |
| | PSASTGTGPGTPGSGTASSSPGTPGSGTASSSPGSSTPSGATGSPGTPGSGTASSS | |
| | PGASPGTSSTGSPGSSTPSGATGSPGTPGSGTASSSPGSSPSASTGTGPGSSTPSG | |
| | ATGSPGSSTPSGATGSPGSSPSASTGTGPGSSTPSGATGSPGTPGSGTASSSPGSS | |
| | PSASTGTGPGTPGSGTASSSPGSSTPSGATGSPGSSPSASTGTGPGSSPSASTGTG | |
| | PGTPGSGTASSSPGASP | |
| AG1524 | GSSTPSGATGSPGTPGSGTASSSPGTPGSGTASSSPGASPGTSSTGSPGSSTPSGA | 123 |
| | TGSPGTPGSGTASSSPGSSTPSGATGSPGSSPSASTGTGPGSSTPSGATGSPGTPG | |
| | SGTASSSPGTPGSGTASSSPGSSPSASTGTGPGSSTPSGATGSPGSSPSASTGTGP | |
| | GTPGSGTASSSPGASPGTSSTGSPGSSTPSGATGSPGASPGTSSTGSPGTPGSGT | |
| | ASSSPGSSTPSGATGSPGTPGSGTASSSPGSSPSASTGTGPGASPGTSSTGSPGAS | |
| | PGTSSTGSPGTPGSGTASSSPGSSTPSGATGSPGSSTPSGATGSPGSSPSASTGTG | |
| | PGSSPSASTGTGPGASPGTSSTGSPGTPGSGTASSSPGTPGSGTASSSPGSSPSAS | |
| | TGTGPGASPGTSSTGSPGASPGTSSTGSPGTPGSGTASSSPGSSPSASTGTGPGA | |
| | SPGTSSTGSPGASPGTSSTGSPGSSTPSGATGSPGSSPSASTGTGPGSSPSASTGT | |
| | GPGTPGSGTASSSPGTPGSGTASSSPGASPGTSSTGSPGSSTPSGATGSPGTPGSG | |
| | TASSSPGASPGTSSTGSPGTPGSGTASSSPGTPGSGTASSSPGSSTPSGATGSPGS | |
| | STPSGATGSPGTPGSGTASSSPGSSPSASTGTGPGSSTPSGATGSPGSSTPSGATG | |
| | SPGSSPSASTGTGPGTPGSGTASSSPGSSPSASTGTGPGASPGTSSTGSPGSSPSA | |
| | STGTGPGTPGSGTASSSPGASPGTSSTGSPGASPGTSSTGSPGTPGSGTASSSPGT | |
| | PGSGTASSSPGSSTPSGATGSPGTPGSGTASSSPGASPGTSSTGSPGSSTPSGATG | |
| | SPGSSTPSGATGSPGSSTPSGATGSPGTPGSGTASSSPGSSPSASTGTGPGSSPSA | |
| | STGTGPGSSPSASTGTGPGASPGTSSTGSPGASPGTSSTGSPGSSPSASTGTGPGT | |
| | PGSGTASSSPGASPGTSSTGSPGSSTPSGATGSPGASPGTSSTGSPGASPGTSSTG | |
| | SPGSSTPSGATGSPGTPG | |
| AG1620 | GSSTPSGATGSPGSSTPSGATGSPGTPGSGTASSSPGSSPSASTGTGPGTPGSGT | 124 |
| | ASSSPGASPGTSSTGSPGSSTPSGATGSPGASPGTSSTGSPGTPGSGTASSSPGAS | |
| | PGTSSTGSPGSSPSASTGTGPGTPGSGTASSSPGASPGTSSTGSPGSSTPSGATGS | |
| | PGSSPSASTGTGPGSSTPSGATGSPGASPGTSSTGSPGASPGTSSTGSPGASPGTS | |
| | STGSPGSSTPSGATGSPGASPGTSSTGSPGTPGSGTASSSPGSSTPSGATGSPGSS | |
| | TPSGATGSPGSSPSASTGTGPGSSPSASTGTGPGSSTPSGATGSPGSSPSASTGTG | |
| | PGSSPSASTGTGPGASPGTSSTGSPGASPGTSSTGSPGTPGSGTASSSPGSSPSAS | |
| | TGTGPGSSPSASTGTGPGASPGTSSTGSPGSSPSASTGTGPGTPGSGTASSSPGSS | |
| | PSASTGTGPGSSTPSGATGSPGASPGTSSTGSPGSSTPSGATGSPGTPGSGTASSS | |
| | PGSSPSASTGTGPGASPGTSSTGSPGSSTPSGATGSPGASPGTSSTGSPGASPGTS | |
| | STGSPGTPGSGTASSSPGASPGTSSTGSPGASPGTSSTGSPGSSTPSGATGSPGTP | |
| | GSGTASSSPGSSPSASTGTGPGSSTPSGATGSPGTPGSGTASSSPGSSTPSGATGS | |
| | PGSSTPSGATGSPGSSPSASTGTGPGSSPSASTGTGPGSSTPSGATGSPGASPGTS | |
| | STGSPGSSPSASTGTGPGTPGSGTASSSPGASPGTSSTGSPGSSPSASTGTGPGSS | |
| | TPSGATGSPGSSPSASTGTGPGSSTPSGATGSPGSSPSASTGTGPGTPGSGTASSS | |
| | PGTPGSGTASSSPGSSTPSGATGSPGSSTPSGATGSPGTPGSGTASSSPGSSPSAS | |
| | TGTGPGSSTPSGATGSPGSSPSASTGTGPGSSPSASTGTGPGSSTPSGATGSPGA | |
| | SPGTSSTGSPGASPGTSSTGSPGTPGSGTASSSPGTPGSGTASSSPGTPGSGTASS | |
| | SPGSSTPSGATGSPGSST | |
| AG1716 | GASPGTSSTGSPGSSPSASTGTGPGSSTPSGATGSPGSSPSASTGTGPGTPGSGT | 125 |
| | ASSSPGSSTPSGATGSPGSSTPSGATGSPGSSPSASTGTGPGSSTPSGATGSPGTP | |
| | GSGTASSSPGSSPSASTGTGPGSSTPSGATGSPGASPGTSSTGSPGSSPSASTGTG | |
| | PGSSPSASTGTGPGTPGSGTASSSPGASPGTSSTGSPGSSTPSGATGSPGSSPSAS | |
| | TGTGPGASPGTSSTGSPGSSTPSGATGSPGTPGSGTASSSPGSSPSASTGTGPGSS | |
| | PSASTGTGPGSSPSASTGTGPGTPGSGTASSSPGTPGSGTASSSPGSSTPSGATGS | |
| | PGTPGSGTASSSPGSSPSASTGTGPGASPGTSSTGSPGASPGTSSTGSPGTPGSGT | |
| | ASSSPGSSPSASTGTGPGASPGTSSTGSPGTPGSGTASSSPGSSTPSGATGSPGSS | |
| | TPSGATGSPGASPGTSSTGSPGTPGSGTASSSPGSSPSASTGTGPGTPGSGTASSS | |
| | PGASPGTSSTGSPGSSTPSGATGSPGASPGTSSTGSPGASPGTSSTGSPGTPGSGT | |
| | ASSSPGTPGSGTASSSPGSSPSASTGTGPGSSPSASTGTGPGSSPSASTGTGPGTP | |
| | GSGTASSSPGASPGTSSTGSPGSSTPSGATGSPGASPGTSSTGSPGSSPSASTGTG | |
| | PGASPGTSSTGSPGSSPSASTGTGPGASPGTSSTGSPGSSPSASTGTGPGSSPSAS | |
| | TGTGPGTPGSGTASSSPGASPGTSSTGSPGTPGSGTASSSPGTPGSGTASSSPGA | |
| | SPGTSSTGSPGSSTPSGATGSPGSSTPSGATGSPGSSPSASTGTGPGSSTPSGATG | |
| | SPGTPGSGTASSSPGSSPSASTGTGPGSSTPSGATGSPGSSTPSGATGSPGSSPSA | |
| | STGTGPGSSPSASTGTGPGASPGTSSTGSPGTPGSGTASSSPGSSPSASTGTGPGS | |
| | STPSGATGSPGASPGTSSTGSPGASPGTSSTGSPGSSPSASTGTGPGASPGTSSTG | |
| | SPGASPGTSSTGSPGTPG | |
| AG1812 | GSSTPSGATGSPGSSPSASTGTGPGASPGTSSTGSPGASPGTSSTGSPGTPGSGT | 126 |
| | ASSSPGSSPSASTGTGPGASPGTSSTGSPGSSTPSGATGSPGSSTPSGATGSPGAS | |
| | PGTSSTGSPGSSPSASTGTGPGTPGSGTASSSPGTPGSGTASSSPGASPGTSSTGS | |
| | PGSSTPSGATGSPGSSTPSGATGSPGSSPSASTGTGPGTPGSGTASSSPGASPGTS | |
| | STGSPGSSTPSGATGSPGTPGSGTASSSPGSSPSASTGTGPGSSTPSGATGSPGTP | |
| | GSGTASSSPGSSPSASTGTGPGTPGSGTASSSPGASPGTSSTGSPGSSTPSGATGS | |
| | PGSSTPSGATGSPGTPGSGTASSSPGSSTPSGATGSPGSSTPSGATGSPGASPGTS | |
| | STGSPGASPGTSSTGSPGASPGTSSTGSPGSSTPSGATGSPGTPGSGTASSSPGSS | |
| | PSASTGTGPGTPGSGTASSSPGASPGTSSTGSPGTPGSGTASSSPGASPGTSSTGS | |
| | PGSSTPSGATGSPGSSPSASTGTGPGSSPSASTGTGPGTPGSGTASSSPGASPGTS | |
| | STGSPGASPGTSSTGSPGTPGSGTASSSPGASPGTSSTGSPGSSTPSGATGSPGSS | |
| | TPSGATGSPGSSPSASTGTGPGASPGTSSTGSPGASPGTSSTGSPGTPGSGTASSS | |
| | PGTPGSGTASSSPGSSTPSGATGSPGSSPSASTGTGPGSSPSASTGTGPGASPGTS | |
| | STGSPGASPGTSSTGSPGSSTPSGATGSPGSSPSASTGTGPGASPGTSSTGSPGSS | |
| | TPSGATGSPGTPGSGTASSSPGSSPSASTGTGPGASPGTSSTGSPGSSTPSGATGS | |
| | PGTPGSGTASSSPGSSTPSGATGSPGSSTPSGATGSPGSSTPSGATGSPGSSPSAS | |
| | TGTGPGSSPSASTGTGPGSSTPSGATGSPGSSPSASTGTGPGSSPSASTGTGPGSS | |
| | TPSGATGSPGASPGTSSTGSPGASPGTSSTGSPGTPGSGTASSSPGASPGTSSTGS | |
| | PGSSTPSGATGSPGASP | |
| AG1908 | GSSPSASTGTGPGSSPSASTGTGPGSSPSASTGTGPGTPGSGTASSSPGSSPSAST | 127 |
| | GTGPGSSPSASTGTGPGASPGTSSTGSPGSSPSASTGTGPGTPGSGTASSSPGTP | |
| | GSGTASSSPGASPGTSSTGSPGTPGSGTASSSPGTPGSGTASSSPGSSPSASTGTG | |
| | PGSSTPSGATGSPGSSPSASTGTGPGASPGTSSTGSPGSSPSASTGTGPGASPGTS | |
| | STGSPGASPGTSSTGSPGTPGSGTASSSPGTPGSGTASSSPGASPGTSSTGSPGTP | |
| | GSGTASSSPGTPGSGTASSSPGSSPSASTGTGPGSSTPSGATGSPGASPGTSSTGS | |
| | PGSSTPSGATGSPGSSPSASTGTGPGSSPSASTGTGPGSSTPSGATGSPGASPGTS | |
| | STGSPGSSPSASTGTGPGTPGSGTASSSPGASPGTSSTGSPGASPGTSSTGSPGTP | |
| | GSGTASSSPGTPGSGTASSSPGSSTPSGATGSPGTPGSGTASSSPGASPGTSSTGS | |
| | PGSSTPSGATGSPGTPGSGTASSSPGSSPSASTGTGPGSSPSASTGTGPGSSTPSG | |
| | ATGSPGASPGTSSTGSPGASPGTSSTGSPGTPGSGTASSSPGTPGSGTASSSPGSS | |
| | TPSGATGSPGSSPSASTGTGPGSSPSASTGTGPGASPGTSSTGSPGASPGTSSTGS | |
| | PGSSTPSGATGSPGASPGTSSTGSPGASPGTSSTGSPGTPGSGTASSSPGTPGSGT | |
| | ASSSPGTPGSGTASSSPGSSTPSGATGSPGSSTPSGATGSPGSSPSASTGTGPGSS | |
| | PSASTGTGPGSSTPSGATGSPGTPGSGTASSSPGSSPSASTGTGPGASPGTSSTGS | |
| | PGSSTPSGATGSPGSSPSASTGTGPGSSTPSGATGSPGASPGTSSTGSPGSSPSAS | |
| | TGTGPGTPGSGTASSSPGSSPSASTGTGPGSSTPSGATGSPGASPGTSSTGSPGSS | |
| | PSASTGTGPGTPGSGTASSSPGSSTPSGATGSPGSSTPSGATGSPGASPGTSSTGS | |
| | PGSSPSASTGTGPGSSP | |
| AG2004A | GSSPSASTGTGPGTPGSGTASSSPGSSTPSGATGSPGTPGSGTASSSPGSSTPSGA | 128 |
| | TGSPGSSTPSGATGSPGSSPSASTGTGPGSSPSASTGTGPGSSPSASTGTGPGTPG | |
| | SGTASSSPGASPGTSSTGSPGSSTPSGATGSPGTPGSGTASSSPGTPGSGTASSSP | |
| | GSSTPSGATGSPGSSTPSGATGSPGSSPSASTGTGPGASPGTSSTGSPGASPGTSS | |
| | TGSPGASPGTSSTGSPGASPGTSSTGSPGTPGSGTASSSPGTPGSGTASSSPGSSP | |
| | SASTGTGPGSSTPSGATGSPGASPGTSSTGSPGSSTPSGATGSPGSSTPSGATGSP | |
| | GSSPSASTGTGPGASPGTSSTGSPGTPGSGTASSSPGSSPSASTGTGPGSSPSAST | |
| | GTGPGASPGTSSTGSPGASPGTSSTGSPGTPGSGTASSSPGASPGTSSTGSPGTP | |
| | GSGTASSSPGTPGSGTASSSPGSSTPSGATGSPGTPGSGTASSSPGASPGTSSTGS | |
| | PGSSTPSGATGSPGSSTPSGATGSPGSSPSASTGTGPGSSTPSGATGSPGSSTPSG | |
| | ATGSPGASPGTSSTGSPGSSPSASTGTGPGTPGSGTASSSPGASPGTSSTGSPGSS | |
| | PSASTGTGPGTPGSGTASSSPGSSPSASTGTGPGTPGSGTASSSPGASPGTSSTGS | |
| | PGASPGTSSTGSPGTPGSGTASSSPGTPGSGTASSSPGSSTPSGATGSPGSSTPSG | |
| | ATGSPGTPGSGTASSSPGSSTPSGATGSPGSSTPSGATGSPGASPGTSSTGSPGSS | |
| | PSASTGTGPGSSTPSGATGSPGSSPSASTGTGPGSSPSASTGTGPGASPGTSSTGS | |
| | PGSSTPSGATGSPGASPGTSSTGSPGTPGSGTASSSPGTPGSGTASSSPGSSPSAS | |
| | TGTGPGASPGTSSTGSPGSSTPSGATGSPGSSPSASTGTGPGSSPSASTGTGPGA | |
| | SPGTSSTGSPGTPGSGTASSSPGSSTPSGATGSPGTPGSGTASSSPGSSPSASTGT | |
| | GPGSSPSASTGTGPGASP | |
| AE72B | SPAGSPTSTEEGSPAGSPTSTEEGTSESATPESGPGTSTEPSEGSAPGTSESATPES | 129 |
| | GPGSEPATSGSETPG | |
| AE72C | TSESATPESGPGTSESATPESGPGSEPATSGSETPGSEPATSGSETPGSPAGSPTS | 130 |
| | TEEGTSTEPSEGSAPG | |
| AE108A | TEEGTSESATPESGPGTSTEPSEGSAPGSPAGSPTSTEEGTSTEPSEGSAPGTSTE | 131 |
| | PSEGSAPGTSESATPESGPGSEPATSGSETPGSEPATSGSETPGSPAGSPTS | |
| AE108B | GSPAGSPTSTEEGTSTEPSEGSAPGTSESATPESGPGTSESATPESGPGTSESATP | 132 |
| | ESGPGSEPATSGSETPGSEPATSGSETPGSPAGSPTSTEEGTSTEPSEGSAP | |
| AE144A | STEPSEGSAPGSPAGSPTSTEEGTSTEPSEGSAPGTSESATPESGPGSEPATSGSE | 133 |
| | TPGTSESATPESGPGSEPATSGSETPGTSESATPESGPGTSTEPSEGSAPGTSESA | |
| | TPESGPGSPAGSPTSTEEGSPAGSPTSTEEGS | |
| AE144B | SEPATSGSETPGTSESATPESGPGSEPATSGSETPGTSESATPESGPGTSTEPSEGS | 134 |
| | APGSPAGSPTSTEEGTSESATPESGPGSEPATSGSETPGTSESATPESGPGSPAGS | |
| | PTSTEEGSPAGSPTSTEEGTSTEPSEGSAPG | |
| AE180A | TSTEEGTSESATPESGPGSEPATSGSETPGTSESATPESGPGSPAGSPTSTEEGSP | 135 |
| | AGSPTSTEEGTSTEPSEGSAPGTSESATPESGPGTSESATPESGPGTSESATPESG | |
| | PGSEPATSGSETPGSEPATSGSETPGSPAGSPTSTEEGTSTEPSEGSAPGTSTEPSE | |
| | GSAPGSEPATS | |
| AE216A | PESGPGTSTEPSEGSAPGSPAGSPTSTEEGTSESATPESGPGSEPATSGSETPGTS | 136 |
| | ESATPESGPGSPAGSPTSTEEGSPAGSPTSTEEGTSTEPSEGSAPGTSESATPESG | |
| | PGTSESATPESGPGTSESATPESGPGSEPATSGSETPGSEPATSGSETPGSPAGSP | |
| | TSTEEGTSTEPSEGSAPGTSTEPSEGSAPGSEPATSGSETPGTSESAT | |
| AE252A | ESGPGSEPATSGSETPGTSESATPESGPGTSTEPSEGSAPGSPAGSPTSTEEGTSE | 137 |
| | SATPESGPGSEPATSGSETPGTSESATPESGPGSPAGSPTSTEEGSPAGSPTSTEE | |
| | GTSTEPSEGSAPGTSESATPESGPGTSESATPESGPGTSESATPESGPGSEPATSG | |
| | SETPGSEPATSGSETPGSPAGSPTSTEEGTSTEPSEGSAPGTSTEPSEGSAPGSEP | |
| | ATSGSETPGTSESATPESGPGTSTEPSE | |
| AE288A | TPESGPGTSTEPSEGSAPGTSESATPESGPGSEPATSGSETPGTSESATPESGPGS | 138 |
| | EPATSGSETPGTSESATPESGPGTSTEPSEGSAPGSPAGSPTSTEEGTSESATPES | |
| | GPGSEPATSGSETPGTSESATPESGPGSPAGSPTSTEEGSPAGSPTSTEEGTSTEP | |
| | SEGSAPGTSESATPESGPGTSESATPESGPGTSESATPESGPGSEPATSGSETPGS | |
| | EPATSGSETPGSPAGSPTSTEEGTSTEPSEGSAPGTSTEPSEGSAPGSEPATSGSE | |
| | TPGTSESA | |
| AE324A | PESGPGSPAGSPTSTEEGSPAGSPTSTEEGSPAGSPTSTEEGTSESATPESGPGTS | 139 |
| | TEPSEGSAPGTSESATPESGPGSEPATSGSETPGTSESATPESGPGSEPATSGSET | |
| | PGTSESATPESGPGTSTEPSEGSAPGSPAGSPTSTEEGTSESATPESGPGSEPATS | |
| | GSETPGTSESATPESGPGSPAGSPTSTEEGSPAGSPTSTEEGTSTEPSEGSAPGTS | |
| | ESATPESGPGTSESATPESGPGTSESATPESGPGSEPATSGSETPGSEPATSGSET | |
| | PGSPAGSPTSTEEGTSTEPSEGSAPGTSTEPSEGSAPGSEPATS | |
| AE360A | PESGPGTSTEPSEGSAPGTSESATPESGPGSPAGSPTSTEEGSPAGSPTSTEEGSP | 140 |
| | AGSPTSTEEGTSESATPESGPGTSTEPSEGSAPGTSESATPESGPGSEPATSGSET | |
| | PGTSESATPESGPGSEPATSGSETPGTSESATPESGPGTSTEPSEGSAPGSPAGSP | |
| | TSTEEGTSESATPESGPGSEPATSGSETPGTSESATPESGPGSPAGSPTSTEEGSP | |
| | AGSPTSTEEGTSTEPSEGSAPGTSESATPESGPGTSESATPESGPGTSESATPESG | |
| | PGSEPATSGSETPGSEPATSGSETPGSPAGSPTSTEEGTSTEPSEGSAPGTSTEPSE | |
| | GSAPGSEPATSGSETPGTSESAT | |
| AE396A | PESGPGSEPATSGSETPGTSESATPESGPGTSTEPSEGSAPGTSESATPESGPGSP | 141 |
| | AGSPTSTEEGSPAGSPTSTEEGSPAGSPTSTEEGTSESATPESGPGTSTEPSEGSA | |
| | PGTSESATPESGPGSEPATSGSETPGTSESATPESGPGSEPATSGSETPGTSESAT | |
| | PESGPGTSTEPSEGSAPGSPAGSPTSTEEGTSESATPESGPGSEPATSGSETPGTS | |
| | ESATPESGPGSPAGSPTSTEEGSPAGSPTSTEEGTSTEPSEGSAPGTSESATPESG | |
| | PGTSESATPESGPGTSESATPESGPGSEPATSGSETPGSEPATSGSETPGSPAGSP | |
| | TSTEEGTSTEPSEGSAPGTSTEPS | |
| AE432A | EGSAPGSPAGSPTSTEEGTSTEPSEGSAPGTSESATPESGPGSEPATSGSETPGTS | 142 |
| | ESATPESGPGSEPATSGSETPGTSESATPESGPGTSTEPSEGSAPGTSESATPESG | |
| | PGSPAGSPTSTEEGSPAGSPTSTEEGSPAGSPTSTEEGTSESATPESGPGTSTEPSE | |
| | GSAPGTSESATPESGPGSEPATSGSETPGTSESATPESGPGSEPATSGSETPGTSE | |
| | SATPESGPGTSTEPSEGSAPGSPAGSPTSTEEGTSESATPESGPGSEPATSGSETP | |
| | GTSESATPESGPGSPAGSPTSTEEGSPAGSPTSTEEGTSTEPSEGSAPGTSESATP | |
| | ESGPGTSESATPESGPGTSESATPESGPGSEPATSGSETPGSEPATSGSETPGSPA | |
| | GSPTSTEEGTSTEPSEGSAPGTSTEPSEGSAPGSEPATS | |
| AE468A | EGSAPGTSTEPSEGSAPGTSTEPSEGSAPGSPAGSPTSTEEGTSTEPSEGSAPGTSE | 143 |
| | SATPESGPGSEPATSGSETPGTSESATPESGPGSEPATSGSETPGTSESATPESGPG | |
| | TSTEPSEGSAPGTSESATPESGPGSPAGSPTSTEEGSPAGSPTSTEEGSPAGSPTST | |
| | EEGTSESATPESGPGTSTEPSEGSAPGTSESATPESGPGSEPATSGSETPGTSESAT | |
| | PESGPGSEPATSGSETPGTSESATPESGPGTSTEPSEGSAPGSPAGSPTSTEEGTSE | |
| | SATPESGPGSEPATSGSETPGTSESATPESGPGSPAGSPTSTEEGSPAGSPTSTEEG | |
| | TSTEPSEGSAPGTSESATPESGPGTSESATPESGPGTSESATPESGPGSEPATSGSE | |
| | TPGSEPATSGSETPGSPAGSPTSTEEGTSTEPSEGSAPGTSTEPSEGSAPGSEPATS | |
| | GSETPGTSESAT | |
| AE504A | EGSAPGTSTEPSEGSAPGTSTEPSEGSAPGTSTEPSEGSAPGTSTEPSEGSAPGSPA | 144 |
| | GSPTSTEEGTSTEPSEGSAPGTSESATPESGPGSEPATSGSETPGTSESATPESGPG | |
| | SEPATSGSETPGTSESATPESGPGTSTEPSEGSAPGTSESATPESGPGSPAGSPTST | |
| | EEGSPAGSPTSTEEGSPAGSPTSTEEGTSESATPESGPGTSTEPSEGSAPGTSESAT | |
| | PESGPGSEPATSGSETPGTSESATPESGPGSEPATSGSETPGTSESATPESGPGTST | |
| | EPSEGSAPGSPAGSPTSTEEGTSESATPESGPGSEPATSGSETPGTSESATPESGPG | |
| | SPAGSPTSTEEGSPAGSPTSTEEGTSTEPSEGSAPGTSESATPESGPGTSESATPES | |
| | GPGTSESATPESGPGSEPATSGSETPGSEPATSGSETPGSPAGSPTSTEEGTSTEPS | |
| | EGSAPGTSTEPSEGSAPGSEPATSGSETPGTSESATPESGPGTSTEPS | |
| AE540A | TPESGPGSPAGSPTSTEEGTSESATPESGPGSEPATSGSETPGTSESATPESGPGTS | 145 |
| | TEPSEGSAPGTSTEPSEGSAPGTSTEPSEGSAPGTSTEPSEGSAPGTSTEPSEGSAP | |
| | GTSTEPSEGSAPGSPAGSPTSTEEGTSTEPSEGSAPGTSESATPESGPGSEPATSGS | |
| | ETPGTSESATPESGPGSEPATSGSETPGTSESATPESGPGTSTEPSEGSAPGTSESA | |
| | TPESGPGSPAGSPTSTEEGSPAGSPTSTEEGSPAGSPTSTEEGTSESATPESGPGTS | |
| | TEPSEGSAPGTSESATPESGPGSEPATSGSETPGTSESATPESGPGSEPATSGSETP | |
| | GTSESATPESGPGTSTEPSEGSAPGSPAGSPTSTEEGTSESATPESGPGSEPATSGS | |
| | ETPGTSESATPESGPGSPAGSPTSTEEGSPAGSPTSTEEGTSTEPSEGSAPGTSESA | |
| | TPESGPGTSESATPESGPGTSESATPESGPGSEPATSGSETPGSEPATSGSETPGSP | |
| | AGSPTSTEEGTSTEPSEGSAPGTSTEP | |
| AE576A | TPESGPGTSESATPESGPGSPAGSPTSTEEGTSESATPESGPGSEPATSGSETPGTS | 146 |
| | ESATPESGPGTSTEPSEGSAPGTSTEPSEGSAPGTSTEPSEGSAPGTSTEPSEGSAP | |
| | GTSTEPSEGSAPGTSTEPSEGSAPGSPAGSPTSTEEGTSTEPSEGSAPGTSESATPE | |
| | SGPGSEPATSGSETPGTSESATPESGPGSEPATSGSETPGTSESATPESGPGTSTEP | |
| | SEGSAPGTSESATPESGPGSPAGSPTSTEEGSPAGSPTSTEEGSPAGSPTSTEEGTS | |
| | ESATPESGPGTSTEPSEGSAPGTSESATPESGPGSEPATSGSETPGTSESATPESGP | |
| | GSEPATSGSETPGTSESATPESGPGTSTEPSEGSAPGSPAGSPTSTEEGTSESATPE | |
| | SGPGSEPATSGSETPGTSESATPESGPGSPAGSPTSTEEGSPAGSPTSTEEGTSTEP | |
| | SEGSAPGTSESATPESGPGTSESATPESGPGTSESATPESGPGSEPATSGSETPGSE | |
| | PATSGSETPGSPAGSPTSTEEGTSTEPSEGSAPGTSTEPSEGSAPGSEPATSGSETP | |
| | GTSESA | |
| AE612A | GSETPGTSTEPSEGSAPGTSTEPSEGSAPGTSESATPESGPGTSESATPESGPGSPA | 147 |
| | GSPTSTEEGTSESATPESGPGSEPATSGSETPGTSESATPESGPGTSTEPSEGSAPG | |
| | TSTEPSEGSAPGTSTEPSEGSAPGTSTEPSEGSAPGTSTEPSEGSAPGTSTEPSEGS | |
| | APGSPAGSPTSTEEGTSTEPSEGSAPGTSESATPESGPGSEPATSGSETPGTSESAT | |
| | PESGPGSEPATSGSETPGTSESATPESGPGTSTEPSEGSAPGTSESATPESGPGSPA | |
| | GSPTSTEEGSPAGSPTSTEEGSPAGSPTSTEEGTSESATPESGPGTSTEPSEGSAPG | |
| | TSESATPESGPGSEPATSGSETPGTSESATPESGPGSEPATSGSETPGTSESATPES | |
| | GPGTSTEPSEGSAPGSPAGSPTSTEEGTSESATPESGPGSEPATSGSETPGTSESAT | |
| | PESGPGSPAGSPTSTEEGSPAGSPTSTEEGTSTEPSEGSAPGTSESATPESGPGTSE | |
| | SATPESGPGTSESATPESGPGSEPATSGSETPGSEPATSGSETPGSPAGSPTSTEEG | |
| | TSTEPSEGSAPGTSTEPSEGSAPGSEPATSGSETPGTSESAT | |
| AE648A | PESGPGTSTEPSEGSAPGTSESATPESGPGSEPATSGSETPGTSTEPSEGSAPGTST | 148 |
| | EPSEGSAPGTSESATPESGPGTSESATPESGPGSPAGSPTSTEEGTSESATPESGPG | |
| | SEPATSGSETPGTSESATPESGPGTSTEPSEGSAPGTSTEPSEGSAPGTSTEPSEGS | |
| | APGTSTEPSEGSAPGTSTEPSEGSAPGTSTEPSEGSAPGSPAGSPTSTEEGTSTEPS | |
| | EGSAPGTSESATPESGPGSEPATSGSETPGTSESATPESGPGSEPATSGSETPGTSE | |
| | SATPESGPGTSTEPSEGSAPGTSESATPESGPGSPAGSPTSTEEGSPAGSPTSTEEG | |
| | SPAGSPTSTEEGTSESATPESGPGTSTEPSEGSAPGTSESATPESGPGSEPATSGSE | |
| | TPGTSESATPESGPGSEPATSGSETPGTSESATPESGPGTSTEPSEGSAPGSPAGSP | |
| | TSTEEGTSESATPESGPGSEPATSGSETPGTSESATPESGPGSPAGSPTSTEEGSPA | |
| | GSPTSTEEGTSTEPSEGSAPGTSESATPESGPGTSESATPESGPGTSESATPESGPG | |
| | SEPATSGSETPGSEPATSGSETPGSPAGSPTSTEEGTSTEPSEGSAPGTSTEPSEGS | |
| | APGSEPATSGSETPGTSESAT | |
| AE684A | EGSAPGSPAGSPTSTEEGTSTEPSEGSAPGTSTEPSEGSAPGTSESATPESGPGTST | 149 |
| | EPSEGSAPGTSESATPESGPGSEPATSGSETPGTSTEPSEGSAPGTSTEPSEGSAPG | |
| | TSESATPESGPGTSESATPESGPGSPAGSPTSTEEGTSESATPESGPGSEPATSGSE | |
| | TPGTSESATPESGPGTSTEPSEGSAPGTSTEPSEGSAPGTSTEPSEGSAPGTSTEPS | |
| | EGSAPGTSTEPSEGSAPGTSTEPSEGSAPGSPAGSPTSTEEGTSTEPSEGSAPGTSE | |
| | SATPESGPGSEPATSGSETPGTSESATPESGPGSEPATSGSETPGTSESATPESGPG | |
| | TSTEPSEGSAPGTSESATPESGPGSPAGSPTSTEEGSPAGSPTSTEEGSPAGSPTST | |
| | EEGTSESATPESGPGTSTEPSEGSAPGTSESATPESGPGSEPATSGSETPGTSESAT | |
| | PESGPGSEPATSGSETPGTSESATPESGPGTSTEPSEGSAPGSPAGSPTSTEEGTSE | |
| | SATPESGPGSEPATSGSETPGTSESATPESGPGSPAGSPTSTEEGSPAGSPTSTEEG | |
| | TSTEPSEGSAPGTSESATPESGPGTSESATPESGPGTSESATPESGPGSEPATSGSE | |
| | TPGSEPATSGSETPGSPAGSPTSTEEGTSTEPSEGSAPGTSTEPSEGSAPGSEPATS | |
| AE720A | TSGSETPGSEPATSGSETPGSPAGSPTSTEEGTSESATPESGPGTSTEPSEGSAPGT | 150 |
| | STEPSEGSAPGSPAGSPTSTEEGTSTEPSEGSAPGTSTEPSEGSAPGTSESATPESG | |
| | PGTSTEPSEGSAPGTSESATPESGPGSEPATSGSETPGTSTEPSEGSAPGTSTEPSE | |
| | GSAPGTSESATPESGPGTSESATPESGPGSPAGSPTSTEEGTSESATPESGPGSEPA | |
| | TSGSETPGTSESATPESGPGTSTEPSEGSAPGTSTEPSEGSAPGTSTEPSEGSAPGT | |
| | STEPSEGSAPGTSTEPSEGSAPGTSTEPSEGSAPGSPAGSPTSTEEGTSTEPSEGSA | |
| | PGTSESATPESGPGSEPATSGSETPGTSESATPESGPGSEPATSGSETPGTSESATP | |
| | ESGPGTSTEPSEGSAPGTSESATPESGPGSPAGSPTSTEEGSPAGSPTSTEEGSPAG | |
| | SPTSTEEGTSESATPESGPGTSTEPSEGSAPGTSESATPESGPGSEPATSGSETPGT | |
| | SESATPESGPGSEPATSGSETPGTSESATPESGPGTSTEPSEGSAPGSPAGSPTSTE | |
| | EGTSESATPESGPGSEPATSGSETPGTSESATPESGPGSPAGSPTSTEEGSPAGSPT | |
| | STEEGTSTEPSEGSAPGTSESATPESGPGTSESATPESGPGTSESATPESGPGSEPA | |
| | TSGSETPGSEPATSGSETPGSPAGSPTSTEEGTSTE | |
| AE756A | TSGSETPGSEPATSGSETPGSPAGSPTSTEEGTSESATPESGPGTSTEPSEGSAPGT | 151 |
| | STEPSEGSAPGSPAGSPTSTEEGTSTEPSEGSAPGTSTEPSEGSAPGTSESATPESG | |
| | PGTSTEPSEGSAPGTSESATPESGPGSEPATSGSETPGTSTEPSEGSAPGTSTEPSE | |
| | GSAPGTSESATPESGPGTSESATPESGPGSPAGSPTSTEEGTSESATPESGPGSEPA | |
| | TSGSETPGTSESATPESGPGTSTEPSEGSAPGTSTEPSEGSAPGTSTEPSEGSAPGT | |
| | STEPSEGSAPGTSTEPSEGSAPGTSTEPSEGSAPGSPAGSPTSTEEGTSTEPSEGSA | |
| | PGTSESATPESGPGSEPATSGSETPGTSESATPESGPGSEPATSGSETPGTSESATP | |
| | ESGPGTSTEPSEGSAPGTSESATPESGPGSPAGSPTSTEEGSPAGSPTSTEEGSPAG | |
| | SPTSTEEGTSESATPESGPGTSTEPSEGSAPGTSESATPESGPGSEPATSGSETPGT | |
| | SESATPESGPGSEPATSGSETPGTSESATPESGPGTSTEPSEGSAPGSPAGSPTSTE | |
| | EGTSESATPESGPGSEPATSGSETPGTSESATPESGPGSPAGSPTSTEEGSPAGSPT | |
| | STEEGTSTEPSEGSAPGTSESATPESGPGTSESATPESGPGTSESATPESGPGSEPA | |
| | TSGSETPGSEPATSGSETPGSPAGSPTSTEEGTSTEPSEGSAPGTSTEPSEGSAPGS | |
| | EPATSGSETPGTSES | |
| AE792A | EGSAPGTSESATPESGPGSEPATSGSETPGSEPATSGSETPGSPAGSPTSTEEGTSE | 152 |
| | SATPESGPGTSTEPSEGSAPGTSTEPSEGSAPGSPAGSPTSTEEGTSTEPSEGSAPG | |
| | TSTEPSEGSAPGTSESATPESGPGTSTEPSEGSAPGTSESATPESGPGSEPATSGSE | |
| | TPGTSTEPSEGSAPGTSTEPSEGSAPGTSESATPESGPGTSESATPESGPGSPAGSP | |
| | TSTEEGTSESATPESGPGSEPATSGSETPGTSESATPESGPGTSTEPSEGSAPGTST | |
| | EPSEGSAPGTSTEPSEGSAPGTSTEPSEGSAPGTSTEPSEGSAPGTSTEPSEGSAPG | |
| | SPAGSPTSTEEGTSTEPSEGSAPGTSESATPESGPGSEPATSGSETPGTSESATPES | |
| | GPGSEPATSGSETPGTSESATPESGPGTSTEPSEGSAPGTSESATPESGPGSPAGSP | |
| | TSTEEGSPAGSPTSTEEGSPAGSPTSTEEGTSESATPESGPGTSTEPSEGSAPGTSE | |
| | SATPESGPGSEPATSGSETPGTSESATPESGPGSEPATSGSETPGTSESATPESGPG | |
| | TSTEPSEGSAPGSPAGSPTSTEEGTSESATPESGPGSEPATSGSETPGTSESATPES | |
| | GPGSPAGSPTSTEEGSPAGSPTSTEEGTSTEPSEGSAPGTSESATPESGPGTSESAT | |
| | PESGPGTSESATPESGPGSEPATSGSETPGSEPATSGSETPGSPAGSPTSTEEGTST | |
| | EPSEGSAPGTSTEPSEGSAPGSEPATSGSETPGTSESATPESGPGTSTEPS | |
| AE828A | PESGPGTSTEPSEGSAPGSPAGSPTSTEEGTSTEPSEGSAPGTSTEPSEGSAPGTSE | 153 |
| | SATPESGPGSEPATSGSETPGSEPATSGSETPGSPAGSPTSTEEGTSESATPESGPG | |
| | TSTEPSEGSAPGTSTEPSEGSAPGSPAGSPTSTEEGTSTEPSEGSAPGTSTEPSEGS | |
| | APGTSESATPESGPGTSTEPSEGSAPGTSESATPESGPGSEPATSGSETPGTSTEPS | |
| | EGSAPGTSTEPSEGSAPGTSESATPESGPGTSESATPESGPGSPAGSPTSTEEGTSE | |
| | SATPESGPGSEPATSGSETPGTSESATPESGPGTSTEPSEGSAPGTSTEPSEGSAPG | |
| | TSTEPSEGSAPGTSTEPSEGSAPGTSTEPSEGSAPGTSTEPSEGSAPGSPAGSPTST | |
| | EEGTSTEPSEGSAPGTSESATPESGPGSEPATSGSETPGTSESATPESGPGSEPATS | |
| | GSETPGTSESATPESGPGTSTEPSEGSAPGTSESATPESGPGSPAGSPTSTEEGSPA | |
| | GSPTSTEEGSPAGSPTSTEEGTSESATPESGPGTSTEPSEGSAPGTSESATPESGPG | |
| | SEPATSGSETPGTSESATPESGPGSEPATSGSETPGTSESATPESGPGTSTEPSEGS | |
| | APGSPAGSPTSTEEGTSESATPESGPGSEPATSGSETPGTSESATPESGPGSPAGSP | |
| | TSTEEGSPAGSPTSTEEGTSTEPSEGSAPGTSESATPESGPGTSESATPESGPGTSE | |
| | SATPESGPGSEPATSGSETPGSEPATSGSETPGSPAGSPTSTEEGTSTEPSEGSAPG | |
| | TSTEPSEGSAPGSEPATSGSETPGTSESAT | |
| AG72A | GPGSSPSASTGTGPGTPGSGTASSSPGSSTPSGATGSPGSSPSASTGTGPGASPGT | 154 |
| | SSTGSPGTPGSGTASS | |
| AG72B | GSSTPSGATGSPGSSTPSGATGSPGSSPSASTGTGPGSSPSASTGTGPGASPGTSS | 155 |
| | TGSPGTPGSGTASSSP | |
| AG72C | SPSASTGTGPGASPGTSSTGSPGSSPSASTGTGPGTPGSGTASSSPGSSTPSGATG | 156 |
| | SPGSSTPSGATGSPGA | |
| AG108A | SASTGTGPGSSPSASTGTGPGTPGSGTASSSPGSSTPSGATGSPGSSPSASTGTGP | 157 |
| | GASPGTSSTGSPGTPGSGTASSSPGSSTPSGATGSPGTPGSGTASSSPGASP | |
| AG108B | PGTPGSGTASSSPGSSTPSGATGSPGTPGSGTASSSPGSSTPSGATGSPGSSTPSG | 158 |
| | ATGSPGSSPSASTGTGPGSSPSASTGTGPGASPGTSSTGSPGTPGSGTASSS | |
| AG144A | PGSSPSASTGTGPGSSPSASTGTGPGTPGSGTASSSPGSSTPSGATGSPGSSPSAST | 159 |
| | GTGPGASPGTSSTGSPGTPGSGTASSSPGSSTPSGATGSPGTPGSGTASSSPGASP | |
| | GTSSTGSPGASPGTSSTGSPGTPGSGTASSS | |
| AG144B | PSGATGSPGTPGSGTASSSPGSSTPSGATGSPGSSTPSGATGSPGSSPSASTGTGP | 160 |
| | GSSPSASTGTGPGASPGTSSTGSPGTPGSGTASSSPGSSTPSGATGSPGSSPSAST | |
| | GTGPGSSPSASTGTGPGASPGTSSTGSPGASP | |
| AG180A | TSSTGSPGSSPSASTGTGPGSSPSASTGTGPGTPGSGTASSSPGSSTPSGATGSPGS | 161 |
| | SPSASTGTGPGASPGTSSTGSPGTPGSGTASSSPGSSTPSGATGSPGTPGSGTASS | |
| | SPGASPGTSSTGSPGASPGTSSTGSPGTPGSGTASSSPGSSTPSGATGSPGASPGT | |
| | SSTGSPGTPGS | |
| AG216A | TGTGPGSSPSASTGTGPGTPGSGTASSSPGSSTPSGATGSPGSSPSASTGTGPGAS | 162 |
| | PGTSSTGSPGTPGSGTASSSPGSSTPSGATGSPGTPGSGTASSSPGASPGTSSTGSP | |
| | GASPGTSSTGSPGTPGSGTASSSPGSSTPSGATGSPGASPGTSSTGSPGTPGSGTA | |
| | SSSPGSSTPSGATGSPGSSPSASTGTGPGSSPSASTGTGPGSSTPSG | |
| AG252A | TSSTGSPGSSPSASTGTGPGSSPSASTGTGPGTPGSGTASSSPGSSTPSGATGSPGS | 163 |
| | SPSASTGTGPGASPGTSSTGSPGTPGSGTASSSPGSSTPSGATGSPGTPGSGTASS | |
| | SPGASPGTSSTGSPGASPGTSSTGSPGTPGSGTASSSPGSSTPSGATGSPGASPGT | |
| | SSTGSPGTPGSGTASSSPGSSTPSGATGSPGSSPSASTGTGPGSSPSASTGTGPGSS | |
| | TPSGATGSPGSSTPSGATGSPGASPG | |
| AG288A | TSSTGSPGSSPSASTGTGPGSSPSASTGTGPGTPGSGTASSSPGSSTPSGATGSPGS | 164 |
| | SPSASTGTGPGASPGTSSTGSPGTPGSGTASSSPGSSTPSGATGSPGTPGSGTASS | |
| | SPGASPGTSSTGSPGASPGTSSTGSPGTPGSGTASSSPGSSTPSGATGSPGASPGT | |
| | SSTGSPGTPGSGTASSSPGSSTPSGATGSPGSSPSASTGTGPGSSPSASTGTGPGSS | |
| | TPSGATGSPGSSTPSGATGSPGASPGTSSTGSPGASPGTSSTGSPGASPGTSSTGS | |
| | PGTPGS | |
| AG324A | TSSTGSPGTPGSGTASSSPGASPGTSSTGSPGASPGTSSTGSPGASPGTSSTGSPG | 165 |
| | ASPGTSSTGSPGTPGSGTASSSPGSSTPSGATGSPGTPGSGTASSSPGSSTPSGAT | |
| | GSPGTPGSGTASSSPGSSTPSGATGSPGSSTPSGATGSPGSSPSASTGTGPGSSPSA | |
| | STGTGPGASPGTSSTGSPGTPGSGTASSSPGSSTPSGATGSPGSSPSASTGTGPGS | |
| | SPSASTGTGPGASPGTSSTGSPGASPGTSSTGSPGSSTPSGATGSPGSSPSASTGT | |
| | GPGASPGTSSTGSPGSSPSASTGTGPGTPGSGTASSSPGSSTP | |
| AG360A | TSSTGSPGASPGTSSTGSPGTPGSGTASSSPGASPGTSSTGSPGASPGTSSTGSPG | 166 |
| | ASPGTSSTGSPGASPGTSSTGSPGTPGSGTASSSPGSSTPSGATGSPGTPGSGTAS | |
| | SSPGSSTPSGATGSPGTPGSGTASSSPGSSTPSGATGSPGSSTPSGATGSPGSSPSA | |
| | STGTGPGSSPSASTGTGPGASPGTSSTGSPGTPGSGTASSSPGSSTPSGATGSPGS | |
| | SPSASTGTGPGSSPSASTGTGPGASPGTSSTGSPGASPGTSSTGSPGSSTPSGATG | |
| | SPGSSPSASTGTGPGASPGTSSTGSPGSSPSASTGTGPGTPGSGTASSSPGSSTPSG | |
| | ATGSPGSSTPSGATGSPGASPG | |
| AG396A | GATGSPGSSTPSGATGSPGSSPSASTGTGPGASPGTSSTGSPGASPGTSSTGSPGT | 167 |
| | PGSGTASSSPGASPGTSSTGSPGASPGTSSTGSPGASPGTSSTGSPGASPGTSSTG | |
| | SPGTPGSGTASSSPGSSTPSGATGSPGTPGSGTASSSPGSSTPSGATGSPGTPGSG | |
| | TASSSPGSSTPSGATGSPGSSTPSGATGSPGSSPSASTGTGPGSSPSASTGTGPGA | |
| | SPGTSSTGSPGTPGSGTASSSPGSSTPSGATGSPGSSPSASTGTGPGSSPSASTGTG | |
| | PGASPGTSSTGSPGASPGTSSTGSPGSSTPSGATGSPGSSPSASTGTGPGASPGTS | |
| | STGSPGSSPSASTGTGPGTPGSGTASSSPGSSTPSGATGSPGSSTPSGATGSPGAS | |
| | PGT | |
| AG432A | GATGSPGSSTPSGATGSPGASPGTSSTGSPGTPGSGTASSSPGSSTPSGATGSPGS | 168 |
| | STPSGATGSPGSSTPSGATGSPGSSPSASTGTGPGASPGTSSTGSPGASPGTSSTG | |
| | SPGTPGSGTASSSPGASPGTSSTGSPGASPGTSSTGSPGASPGTSSTGSPGASPGT | |
| | SSTGSPGTPGSGTASSSPGSSTPSGATGSPGTPGSGTASSSPGSSTPSGATGSPGTP | |
| | GSGTASSSPGSSTPSGATGSPGSSTPSGATGSPGSSPSASTGTGPGSSPSASTGTG | |
| | PGASPGTSSTGSPGTPGSGTASSSPGSSTPSGATGSPGSSPSASTGTGPGSSPSAST | |
| | GTGPGASPGTSSTGSPGASPGTSSTGSPGSSTPSGATGSPGSSPSASTGTGPGASP | |
| | GTSSTGSPGSSPSASTGTGPGTPGSGTASSSPGSSTPS | |
| AG468A | TSSTGSPGSSPSASTGTGPGTPGSGTASSSPGASPGTSSTGSPGASPGTSSTGSPG | 169 |
| | ASPGTSSTGSPGSSTPSGATGSPGSSTPSGATGSPGASPGTSSTGSPGTPGSGTAS | |
| | SSPGSSTPSGATGSPGSSTPSGATGSPGSSTPSGATGSPGSSPSASTGTGPGASPG | |
| | TSSTGSPGASPGTSSTGSPGTPGSGTASSSPGASPGTSSTGSPGASPGTSSTGSPG | |
| | ASPGTSSTGSPGASPGTSSTGSPGTPGSGTASSSPGSSTPSGATGSPGTPGSGTAS | |
| | SSPGSSTPSGATGSPGTPGSGTASSSPGSSTPSGATGSPGSSTPSGATGSPGSSPSA | |
| | STGTGPGSSPSASTGTGPGASPGTSSTGSPGTPGSGTASSSPGSSTPSGATGSPGS | |
| | SPSASTGTGPGSSPSASTGTGPGASPGTSSTGSPGASPGTSSTGSPGSSTPSGATG | |
| | SPGSSPSASTGTGPGASPG | |
| AG504A | TSSTGSPGSSPSASTGTGPGTPGSGTASSSPGASPGTSSTGSPGASPGTSSTGSPG | 170 |
| | ASPGTSSTGSPGSSTPSGATGSPGSSTPSGATGSPGASPGTSSTGSPGTPGSGTAS | |
| | SSPGSSTPSGATGSPGSSTPSGATGSPGSSTPSGATGSPGSSPSASTGTGPGASPG | |
| | TSSTGSPGASPGTSSTGSPGTPGSGTASSSPGASPGTSSTGSPGASPGTSSTGSPG | |
| | ASPGTSSTGSPGASPGTSSTGSPGTPGSGTASSSPGSSTPSGATGSPGTPGSGTAS | |
| | SSPGSSTPSGATGSPGTPGSGTASSSPGSSTPSGATGSPGSSTPSGATGSPGSSPSA | |
| | STGTGPGSSPSASTGTGPGASPGTSSTGSPGTPGSGTASSSPGSSTPSGATGSPGS | |
| | SPSASTGTGPGSSPSASTGTGPGASPGTSSTGSPGASPGTSSTGSPGSSTPSGATG | |
| | SPGSSPSASTGTGPGASPGTSSTGSPGSSPSASTGTGPGTPGSGTASSSPGSSTP | |
| AG540A | TSSTGSPGASPGTSSTGSPGSSPSASTGTGPGTPGSGTASSSPGASPGTSSTGSPG | 171 |
| | ASPGTSSTGSPGASPGTSSTGSPGSSTPSGATGSPGSSTPSGATGSPGASPGTSST | |
| | GSPGTPGSGTASSSPGSSTPSGATGSPGSSTPSGATGSPGSSTPSGATGSPGSSPSA | |
| | STGTGPGASPGTSSTGSPGASPGTSSTGSPGTPGSGTASSSPGASPGTSSTGSPGA | |
| | SPGTSSTGSPGASPGTSSTGSPGASPGTSSTGSPGTPGSGTASSSPGSSTPSGATGS | |
| | PGTPGSGTASSSPGSSTPSGATGSPGTPGSGTASSSPGSSTPSGATGSPGSSTPSG | |
| | ATGSPGSSPSASTGTGPGSSPSASTGTGPGASPGTSSTGSPGTPGSGTASSSPGSS | |
| | TPSGATGSPGSSPSASTGTGPGSSPSASTGTGPGASPGTSSTGSPGASPGTSSTGS | |
| | PGSSTPSGATGSPGSSPSASTGTGPGASPGTSSTGSPGSSPSASTGTGPGTPGSGT | |
| | ASSSPGSSTPSGATGSPGSSTPSGATGSPGASPG | |
| AG576A | TSSTGSPGTPGSGTASSSPGASPGTSSTGSPGASPGTSSTGSPGASPGTSSTGSPGS | 172 |
| | SPSASTGTGPGTPGSGTASSSPGASPGTSSTGSPGASPGTSSTGSPGASPGTSSTG | |
| | SPGSSTPSGATGSPGSSTPSGATGSPGASPGTSSTGSPGTPGSGTASSSPGSSTPSG | |
| | ATGSPGSSTPSGATGSPGSSTPSGATGSPGSSPSASTGTGPGASPGTSSTGSPGAS | |
| | PGTSSTGSPGTPGSGTASSSPGASPGTSSTGSPGASPGTSSTGSPGASPGTSSTGSP | |
| | GASPGTSSTGSPGTPGSGTASSSPGSSTPSGATGSPGTPGSGTASSSPGSSTPSGA | |
| | TGSPGTPGSGTASSSPGSSTPSGATGSPGSSTPSGATGSPGSSPSASTGTGPGSSPS | |
| | ASTGTGPGASPGTSSTGSPGTPGSGTASSSPGSSTPSGATGSPGSSPSASTGTGPG | |
| | SSPSASTGTGPGASPGTSSTGSPGASPGTSSTGSPGSSTPSGATGSPGSSPSASTGT | |
| | GPGASPGTSSTGSPGSSPSASTGTGPGTPGSGTASSSPGSSTPSGATGSPGSSTPS | |
| | GATGSPGASPG | |
| AG612A | STGSPGTPGSGTASSSPGSSTPSGATGSPGASPGTSSTGSPGTPGSGTASSSPGSST | 173 |
| | PSGATGSPGSSPSASTGTGPGSSPSASTGTGPGSSTPSGATGSPGSSTPSGATGSP | |
| | GASPGTSSTGSPGASPGTSSTGSPGASPGTSSTGSPGTPGSGTASSSPGASPGTSS | |
| | TGSPGASPGTSSTGSPGASPGTSSTGSPGSSPSASTGTGPGTPGSGTASSSPGASP | |
| | GTSSTGSPGASPGTSSTGSPGASPGTSSTGSPGSSTPSGATGSPGSSTPSGATGSP | |
| | GASPGTSSTGSPGTPGSGTASSSPGSSTPSGATGSPGSSTPSGATGSPGSSTPSGA | |
| | TGSPGSSPSASTGTGPGASPGTSSTGSPGASPGTSSTGSPGTPGSGTASSSPGASP | |
| | GTSSTGSPGASPGTSSTGSPGASPGTSSTGSPGASPGTSSTGSPGTPGSGTASSSP | |
| | GSSTPSGATGSPGTPGSGTASSSPGSSTPSGATGSPGTPGSGTASSSPGSSTPSGA | |
| | TGSPGSSTPSGATGSPGSSPSASTGTGPGSSPSASTGTGPGASPGTSSTGSPGTPG | |
| | SGTASSSPGSSTPSGATGSPGSSPSASTGTGPGSSPSASTGTGPGASPGTS | |
| AG648A | GTASSSPGSSTPSGATGSPGSSPSASTGTGPGSSPSASTGTGPGSSTPSGATGSPG | 174 |
| | SSTPSGATGSPGASPGTSSTGSPGASPGTSSTGSPGASPGTSSTGSPGTPGSGTAS | |
| | SSPGASPGTSSTGSPGASPGTSSTGSPGASPGTSSTGSPGSSPSASTGTGPGTPGS | |
| | GTASSSPGASPGTSSTGSPGASPGTSSTGSPGASPGTSSTGSPGSSTPSGATGSPG | |
| | SSTPSGATGSPGASPGTSSTGSPGTPGSGTASSSPGSSTPSGATGSPGSSTPSGAT | |
| | GSPGSSTPSGATGSPGSSPSASTGTGPGASPGTSSTGSPGASPGTSSTGSPGTPGS | |
| | GTASSSPGASPGTSSTGSPGASPGTSSTGSPGASPGTSSTGSPGASPGTSSTGSPG | |
| | TPGSGTASSSPGSSTPSGATGSPGTPGSGTASSSPGSSTPSGATGSPGTPGSGTAS | |
| | SSPGSSTPSGATGSPGSSTPSGATGSPGSSPSASTGTGPGSSPSASTGTGPGASPG | |
| | TSSTGSPGTPGSGTASSSPGSSTPSGATGSPGSSPSASTGTGPGSSPSASTGTGPG | |
| | ASPGTSSTGSPGASPGTSSTGSPGSSTPSGATGSPGSSPSASTGTGPGASPGTSST | |
| | GSPGSSPSASTGTGPGTPGSGTASSSPGSSTP | |
| AG684A | TSSTGSPGTPGSGTASSSPGSSTPSGATGSPGSSPSASTGTGPGSSPSASTGTGPGS | 175 |
| | STPSGATGSPGSSTPSGATGSPGASPGTSSTGSPGASPGTSSTGSPGASPGTSSTG | |
| | SPGTPGSGTASSSPGASPGTSSTGSPGASPGTSSTGSPGASPGTSSTGSPGSSPSAS | |
| | TGTGPGTPGSGTASSSPGASPGTSSTGSPGASPGTSSTGSPGASPGTSSTGSPGSS | |
| | TPSGATGSPGSSTPSGATGSPGASPGTSSTGSPGTPGSGTASSSPGSSTPSGATGS | |
| | PGSSTPSGATGSPGSSTPSGATGSPGSSPSASTGTGPGASPGTSSTGSPGASPGTS | |
| | STGSPGTPGSGTASSSPGASPGTSSTGSPGASPGTSSTGSPGASPGTSSTGSPGAS | |
| | PGTSSTGSPGTPGSGTASSSPGSSTPSGATGSPGTPGSGTASSSPGSSTPSGATGSP | |
| | GTPGSGTASSSPGSSTPSGATGSPGSSTPSGATGSPGSSPSASTGTGPGSSPSAST | |
| | GTGPGASPGTSSTGSPGTPGSGTASSSPGSSTPSGATGSPGSSPSASTGTGPGSSP | |
| | SASTGTGPGASPGTSSTGSPGASPGTSSTGSPGSSTPSGATGSPGSSPSASTGTGP | |
| | GASPGTSSTGSPGSSPSASTGTGPGTPGSGTASSSPGSSTPSGATGSPGSSTPSGA | |
| | TGSPGASPG | |
| AG720A | TSSTGSPGTPGSGTASSSPGSSTPSGATGSPGASPGTSSTGSPGTPGSGTASSSPGS | 176 |
| | STPSGATGSPGSSPSASTGTGPGSSPSASTGTGPGSSTPSGATGSPGSSTPSGATG | |
| | SPGASPGTSSTGSPGASPGTSSTGSPGASPGTSSTGSPGTPGSGTASSSPGASPGT | |
| | SSTGSPGASPGTSSTGSPGASPGTSSTGSPGSSPSASTGTGPGTPGSGTASSSPGA | |
| | SPGTSSTGSPGASPGTSSTGSPGASPGTSSTGSPGSSTPSGATGSPGSSTPSGATGS | |
| | PGASPGTSSTGSPGTPGSGTASSSPGSSTPSGATGSPGSSTPSGATGSPGSSTPSG | |
| | ATGSPGSSPSASTGTGPGASPGTSSTGSPGASPGTSSTGSPGTPGSGTASSSPGAS | |
| | PGTSSTGSPGASPGTSSTGSPGASPGTSSTGSPGASPGTSSTGSPGTPGSGTASSSP | |
| | GSSTPSGATGSPGTPGSGTASSSPGSSTPSGATGSPGTPGSGTASSSPGSSTPSGA | |
| | TGSPGSSTPSGATGSPGSSPSASTGTGPGSSPSASTGTGPGASPGTSSTGSPGTPG | |
| | SGTASSSPGSSTPSGATGSPGSSPSASTGTGPGSSPSASTGTGPGASPGTSSTGSP | |
| | GASPGTSSTGSPGSSTPSGATGSPGSSPSASTGTGPGASPGTSSTGSPGSSPSAST | |
| | GTGPGTPGSGTASSSPGSSTPSGATGSPGSSTPSGATGSPGASPG | |
| AG756A | TSSTGSPGSSPSASTGTGPGSSPSASTGTGPGTPGSGTASSSPGSSTPSGATGSPGS | 177 |
| | SPSASTGTGPGASPGTSSTGSPGTPGSGTASSSPGSSTPSGATGSPGTPGSGTASS | |
| | SPGASPGTSSTGSPGASPGTSSTGSPGTPGSGTASSSPGSSTPSGATGSPGASPGT | |
| | SSTGSPGTPGSGTASSSPGSSTPSGATGSPGSSPSASTGTGPGSSPSASTGTGPGSS | |
| | TPSGATGSPGSSTPSGATGSPGASPGTSSTGSPGASPGTSSTGSPGASPGTSSTGS | |
| | PGTPGSGTASSSPGASPGTSSTGSPGASPGTSSTGSPGASPGTSSTGSPGSSPSAST | |
| | GTGPGTPGSGTASSSPGASPGTSSTGSPGASPGTSSTGSPGASPGTSSTGSPGSST | |
| | PSGATGSPGSSTPSGATGSPGASPGTSSTGSPGTPGSGTASSSPGSSTPSGATGSP | |
| | GSSTPSGATGSPGSSTPSGATGSPGSSPSASTGTGPGASPGTSSTGSPGASPGTSS | |
| | TGSPGTPGSGTASSSPGASPGTSSTGSPGASPGTSSTGSPGASPGTSSTGSPGASP | |
| | GTSSTGSPGTPGSGTASSSPGSSTPSGATGSPGTPGSGTASSSPGSSTPSGATGSP | |
| | GTPGSGTASSSPGSSTPSGATGSPGSSTPSGATGSPGSSPSASTGTGPGSSPSAST | |
| | GTGPGASPGTSSTGSPGTPGSGTASSSPGSSTPSGATGSPGSSPSASTGTGPGSSP | |
| | SASTGTGPGASPGTSSTGSPGASPG | |
| AG792A | TSSTGSPGSSPSASTGTGPGSSPSASTGTGPGTPGSGTASSSPGSSTPSGATGSPGS | 178 |
| | SPSASTGTGPGASPGTSSTGSPGTPGSGTASSSPGSSTPSGATGSPGTPGSGTASS | |
| | SPGASPGTSSTGSPGASPGTSSTGSPGTPGSGTASSSPGSSTPSGATGSPGASPGT | |
| | SSTGSPGTPGSGTASSSPGSSTPSGATGSPGSSPSASTGTGPGSSPSASTGTGPGSS | |
| | TPSGATGSPGSSTPSGATGSPGASPGTSSTGSPGASPGTSSTGSPGASPGTSSTGS | |
| | PGTPGSGTASSSPGASPGTSSTGSPGASPGTSSTGSPGASPGTSSTGSPGSSPSAST | |
| | GTGPGTPGSGTASSSPGASPGTSSTGSPGASPGTSSTGSPGASPGTSSTGSPGSST | |
| | PSGATGSPGSSTPSGATGSPGASPGTSSTGSPGTPGSGTASSSPGSSTPSGATGSP | |
| | GSSTPSGATGSPGSSTPSGATGSPGSSPSASTGTGPGASPGTSSTGSPGASPGTSS | |
| | TGSPGTPGSGTASSSPGASPGTSSTGSPGASPGTSSTGSPGASPGTSSTGSPGASP | |
| | GTSSTGSPGTPGSGTASSSPGSSTPSGATGSPGTPGSGTASSSPGSSTPSGATGSP | |
| | GTPGSGTASSSPGSSTPSGATGSPGSSTPSGATGSPGSSPSASTGTGPGSSPSAST | |
| | GTGPGASPGTSSTGSPGTPGSGTASSSPGSSTPSGATGSPGSSPSASTGTGPGSSP | |
| | SASTGTGPGASPGTSSTGSPGASPGTSSTGSPGSSTPSGATGSPGSSPSASTGTGP | |
| | GASPG | |
| AG828A | TSSTGSPGSSPSASTGTGPGSSPSASTGTGPGTPGSGTASSSPGSSTPSGATGSPGS | 179 |
| | SPSASTGTGPGASPGTSSTGSPGTPGSGTASSSPGSSTPSGATGSPGTPGSGTASS | |
| | SPGASPGTSSTGSPGASPGTSSTGSPGTPGSGTASSSPGSSTPSGATGSPGASPGT | |
| | SSTGSPGTPGSGTASSSPGSSTPSGATGSPGSSPSASTGTGPGSSPSASTGTGPGSS | |
| | TPSGATGSPGSSTPSGATGSPGASPGTSSTGSPGASPGTSSTGSPGASPGTSSTGS | |
| | PGTPGSGTASSSPGASPGTSSTGSPGASPGTSSTGSPGASPGTSSTGSPGSSPSAST | |
| | GTGPGTPGSGTASSSPGASPGTSSTGSPGASPGTSSTGSPGASPGTSSTGSPGSST | |
| | PSGATGSPGSSTPSGATGSPGASPGTSSTGSPGTPGSGTASSSPGSSTPSGATGSP | |
| | GSSTPSGATGSPGSSTPSGATGSPGSSPSASTGTGPGASPGTSSTGSPGASPGTSS | |
| | TGSPGTPGSGTASSSPGASPGTSSTGSPGASPGTSSTGSPGASPGTSSTGSPGASP | |
| | GTSSTGSPGTPGSGTASSSPGSSTPSGATGSPGTPGSGTASSSPGSSTPSGATGSP | |
| | GTPGSGTASSSPGSSTPSGATGSPGSSTPSGATGSPGSSPSASTGTGPGSSPSAST | |
| | GTGPGASPGTSSTGSPGTPGSGTASSSPGSSTPSGATGSPGSSPSASTGTGPGSSP | |
| | SASTGTGPGASPGTSSTGSPGASPGTSSTGSPGSSTPSGATGSPGSSPSASTGTGP | |
| | GASPGTSSTGSPGSSPSASTGTGPGTPGSGTASSSPGSSTP | |
| AG288_DE | GTPGSGTASSSPGSSTPSGATGSPGSSTPSGATGSPGSSTPSGATGSPGSSPSAST | 180 |
| | GTGPGASPGTSSTGSPGASPGTSSTGSPGTPGSGTASSSPGASPGTSSTGSPGASP | |
| | GTSSTGSPGASPGTSSTGSPGASPGTSSTGSPGTPGSGTASSSPGSSTPSGATGSP | |
| | GTPGSGTASSSPGSSTPSGATGSPGTPGSGTASSSPGSSTPSGATGSPGSSTPSGA | |
| | TGSPGSSPSASTGTGPGSSPSASTGTGPGASPGTSSTGSPGTPGSGTASSSPGSSTP | |
| | SGATGSP | |

[0169] In other embodiments, the GLP2-XTEN composition comprises one or more non-repetitive XTEN sequences of about 36 to about 3000 amino acid residues or about 144 to about 2000 amino acid residues or about 288 or about 1000 amino acid residues, wherein at least about 80%, or at least about 90%, or about 91%, or about 92%, or about 93%, or about 94%, or about 95%, or about 96%, or about 97%, or about 98%, or about 99% to about 100% of the sequence consists of non-overlapping 36 amino acid sequence motifs selected from one or more of the polypeptide sequences of Tables 8-11, either as a family sequence, or where motifs are selected from two or more families of motifs.

[0170] In those embodiments wherein the XTEN component of the GLP2-XTEN fusion protein has less than 100% of its amino acids consisting of four to six amino acid selected from glycine (G), alanine (A), serine (S), threonine (T), glutamate (E) and proline (P), or less than 100% of the sequence consisting of the sequence motifs from Table 3 or the sequences of Tables 4, and 8-12 or less than 100% sequence identity compared with an XTEN from Table 4, the other amino acid residues are selected from any other of the 14 natural L-amino acids, but are preferentially selected from hydrophilic amino acids such that the XTEN sequence contains at least about 90%, or at least about 91%, or at least about 92%, or at least about 93%, or at least about 94%, or at least about 95%, or at least about 96%, or at least about 97%, or at least about 98%, or at least about 99% hydrophilic amino acids. The XTEN amino acids that are not glycine (G), alanine (A), serine (S), threonine (T), glutamate (E) and proline (P) are interspersed throughout the XTEN sequence, are located within or between the sequence motifs, or are concentrated in one or more short stretches of the XTEN sequence. In such cases where the XTEN component of the GLP2-XTEN comprises amino acids other than glycine (G), alanine (A), serine (S), threonine (T), glutamate (E) and proline (P), it is desirable that the amino acids not be hydrophobic residues and should not substantially confer secondary structure of the XTEN component. Hydrophobic residues that are less favored in construction of XTEN include tryptophan, phenylalanine, tyrosine, leucine, isoleucine, valine, and methionine. Additionally, one can design the XTEN sequences to contain less than 5% or less than 4% or less than 3% or less than 2% or less than 1% or none of the following amino acids: cysteine (to avoid disulfide formation and oxidation), methionine (to avoid oxidation), asparagine and glutamine (to avoid desamidation). Thus, in some embodiments, the XTEN component of the GLP2-XTEN fusion protein comprising other amino acids in addition to glycine (G), alanine (A), serine (S), threonine (T), glutamate (E) and proline (P) would have a sequence with less than 5% of the residues contributing to alpha-helices and beta-sheets as measured by the Chou-Fasman algorithm and have at least 90%, or at least about 95% or more random coil formation as measured by the GOR algorithm.

[0171] 3. Length of Sequence

[0172] In another aspect, the invention provides XTEN of varying lengths for incorporation into GLP2-XTEN compositions wherein the length of the XTEN sequence(s) are chosen based on the property or function to be achieved in the fusion protein. Depending on the intended property or function, the GLP2-XTEN compositions comprise short or intermediate length XTEN and/or longer XTEN sequences that can serve as carriers. While not intended to be limiting, the XTEN or fragments of XTEN include short segments of about 6 to about 99 amino acid residues, intermediate lengths of about 100 to about 399 amino acid residues, and longer lengths of about 400 to about 3000 amino acid residues. Thus, the subject GLP2-XTEN encompass XTEN or fragments of XTEN with lengths of about 6, or about 12, or about 36, or about 40, or about 100, or about 144, or about 288, or about 401, or about 500, or about 600, or about 700, or about 800, or about 900, or about 1000, or about 1500, or about 2000, or about 2500, or up to about 3000 amino acid residues in length. In other cases, the XTEN sequences can be about 6 to about 50, or about 100 to 150, about 150 to 250, about 250 to 400, about 400 to about 500, about 500 to 900, about 900 to 1500, about 1500 to 2000, or about 2000 to about 3000 amino acid residues in length. The precise length of an XTEN can vary without adversely affecting the biological activity of a GLP2-XTEN composition. In one embodiment, one or more of the XTEN used in the GLP2-XEN disclosed herein has 36 amino acids, 42 amino acids, 144 amino acids, 288 amino acids, 576 amino acids, or 864 amino acids in length and may be selected from one of the XTEN family sequences; i.e., AD, AE, AF, AG, AM, AQ, BC or BD. In another embodiment, one or more of the XTEN used herein is selected from the group consisting of XTEN_AE864, XTEN_AE576, XTEN_AE288, XTEN_AE144, XTEN_AE42, XTEN_AG864, XTEN_AG576, XTEN_AG288, XTENAG144, and XTEN_AG42 or other XTEN sequences in Table 4. In the embodiments of the GLP2-XTEN, the one or more XTEN or fragments of XTEN sequences individually exhibit at least about 80% sequence identity, or alternatively 81%, 82%, 83%, 84%, 85%, 86%, 87%, 88%, 89%, 90%, 91%, 92%, 93%, 94%, 95%, 96%, 97%, 98%, 99%, or 100% sequence identity compared to a motif or an XTEN selected from Table 4, or a fragment thereof with comparable length. In some embodiments, the GLP2-XTEN fusion proteins comprise a first and at least a second XTEN sequence, wherein the cumulative length of the residues in the XTEN sequences is greater than about 100 to about 3000 or about 400 to about 1000 amino acid residues and the XTEN can be identical or they can be different in sequence or in length. As used herein, “cumulative length” is intended to encompass the total length, in amino acid residues, when more than one XTEN is incorporated into the GLP2-XTEN fusion protein.

[0173] As described more fully below, methods are disclosed in which the GLP2-XTEN is designed by selecting the length of the XTEN to confer a target half-life or other physicochemical property on a fusion protein administered to a subject. When XTEN are used as a carrier, the invention takes advantage of the discovery that increasing the length of the non-repetitive, unstructured polypeptides enhances the unstructured nature of the XTENs and correspondingly enhances the biological and pharmacokinetic properties of fusion proteins comprising the XTEN carrier. In general, XTEN cumulative lengths longer that about 400 residues incorporated into the fusion protein compositions result in longer half-life compared to shorter cumulative lengths, e.g., shorter than about 280 residues. As described more fully in the Examples, proportional increases in the length of the XTEN, even if created by a repeated order of single family sequence motifs (e.g., the four AE motifs of Table 3), result in a sequence with a higher percentage of random coil formation, as determined by GOR algorithm, or reduced content of alpha-helices or beta-sheets, as determined by Chou-Fasman algorithm, compared to shorter XTEN lengths. In addition, increasing the length of the unstructured polypeptide fusion partner, as described in the Examples, results in a fusion protein with a disproportionate increase in terminal half-life compared to fusion proteins with unstructured polypeptide partners with shorter sequence lengths.

[0174] In some embodiments, where the XTEN serve primarily as a carrier, the invention encompasses GLP2-XTEN compositions comprising one or more XTEN wherein the cumulative XTEN sequence length of the fusion protein(s) is greater than about 100, 200, 400, 500, 600, 800, 900, or 1000 to about 3000 amino acid residues, wherein the fusion protein exhibits enhanced pharmacokinetic properties when administered to a subject compared to a GLP-2 not linked to the XTEN and administered at a comparable dose. In one embodiment of the foregoing, the one or more XTEN sequences exhibit at least about 80%, 90%, 91%, 92%, 93%, 94%, 95%, 96%, 97%, or 98% or more identity to a sequence selected from Table 4, and the remainder, if any, of the carrier sequence(s) contains at least 90% hydrophilic amino acids and less than about 2% of the overall sequence consists of hydrophobic or aromatic amino acids or cysteine. The enhanced pharmacokinetic properties of the GLP2-XTEN in comparison to GLP-2 not linked to XTEN are described more fully, below.

[0175] In another aspect, the invention provides methods to create XTEN of short or intermediate lengths from longer “donor” XTEN sequences, wherein the longer donor sequence is created by truncating at the N-terminus, or the C-terminus, or a fragment is created from the interior of a donor sequence, thereby resulting in a short or intermediate length XTEN. In non-limiting examples, as schematically depicted in FIG. 3A-C, the AG864 sequence of 864 amino acid residues can be truncated to yield an AG144 with 144 residues, an AG288 with 288 residues, an AG576 with 576 residues, or other intermediate lengths, while the AE864 sequence (as depicted in FIG. 3D, E) can be truncated to yield an AE288 or AE576 or other intermediate lengths. It is specifically contemplated that such an approach can be utilized with any of the XTEN embodiments described herein or with any of the sequences listed in Tables 4 or 8-12 to result in XTEN of a desired length.

[0176] 4. Net Charge

[0177] In other embodiments, the XTEN polypeptides have an unstructured characteristic imparted by incorporation of amino acid residues with a net charge and containing a low proportion or no hydrophobic amino acids in the XTEN sequence. The overall net charge and net charge density is controlled by modifying the content of charged amino acids in the XTEN sequences, either positive or negative, with the net charge typically represented as the percentage of amino acids in the polypeptide contributing to a charged state beyond those residues that are cancelled by a residue with an opposing charge. In some embodiments, the net charge density of the XTEN of the compositions may be above +0.1 or below −0.1 charges/residue. By “net charge density” of a protein or peptide herein is meant the net charge divided by the total number of amino acids in the protein or propeptide. In other embodiments, the net charge of an XTEN can be about 0%, about 1%, about 2%, about 3%, about 4%, about 5%, about 6%, about 7%, about 8%, about 9%, about 10% about 11%, about 12%, about 13%, about 14%, about 15%, about 16%, about 17%, about 18%, about 19%, or about 20% or more. In some embodiments, the XTEN sequence comprises charged residues separated by other residues such as serine or glycine, which leads to better expression or purification behavior. Based on the net charge, some XTENs have an isoelectric point (pl) of 1.0, 1.5, 2.0, 2.5, 3.0, 3.5, 4.0, 4.5, 5.0, 5.5, 6.0, or even 6.5. In one embodiment, the XTEN will have an isoelectric point between 1.5 and 4.5 and carry a net negative charge under physiologic conditions.

[0178] Since most tissues and surfaces in a human or animal have a net negative charge, in some embodiments the XTEN sequences are designed to have a net negative charge to minimize non-specific interactions between the XTEN containing compositions and various surfaces such as blood vessels, healthy tissues, or various receptors. Not to be bound by a particular theory, an XTEN can adopt open conformations due to electrostatic repulsion between individual amino acids of the XTEN polypeptide that individually carry a net negative charge and that are distributed across the sequence of the XTEN polypeptide. In some embodiments, the XTEN sequence is designed with at least 90% or 95% of the charged residues separated by other residues such as serine, alanine, threonine, proline or glycine, which leads to a more uniform distribution of charge, better expression or purification behavior. Such a distribution of net negative charge in the extended sequence lengths of XTEN can lead to an unstructured conformation that, in turn, can result in an effective increase in hydrodynamic radius. In preferred embodiments, the negative charge of the subject XTEN is conferred by incorporation of glutamic acid residues. Generally, the glutamic residues are spaced uniformly across the XTEN sequence. In some cases, the XTEN can contain about 10-80, or about 15-60, or about 20-50 glutamic residues per 20 kDa of XTEN that can result in an XTEN with charged residues that would have very similar pKa, which can increase the charge homogeneity of the product and sharpen its isoelectric point, enhance the physicochemical properties of the resulting GLP2-XTEN fusion protein for, and hence, simplifying purification procedures. For example, where an XTEN with a negative charge is desired, the XTEN can be selected solely from an AE family sequence, which has approximately a 17% net charge due to incorporated glutamic acid, or can include varying proportions of glutamic acid-containing motifs of Table 3 to provide the desired degree of net charge. Non-limiting examples of AE XTEN include, but are not limited to the AE36, AE42, AE48, AE144, AE288, AE576, AE624, AE864, and AE912 polypeptide sequences of Tables 4 or 9, or fragments thereof. In one embodiment, an XTEN sequence of Tables 4 or 9 can be modified to include additional glutamic acid residues to achieve the desired net negative charge. Accordingly, in one embodiment the invention provides XTEN in which the XTEN sequences contain about 1%, 2%, 4%, 8%, 10%, 15%, 17%, 20%, 25%, or even about 30% glutamic acid. In some cases, the XTEN can contain about 10-80, or about 15-60, or about 20-50 glutamic residues per 20 kDa of XTEN that can result in an XTEN with charged residues that would have very similar pKa, which can increase the charge homogeneity of the product and sharpen its isoelectric point, enhance the physicochemical properties of the resulting GLP2-XTEN fusion protein for, and hence, simplifying purification procedures. In one embodiment, the invention contemplates incorporation of aspartic acid residues into XTEN in addition to glutamic acid in order to achieve a net negative charge.

[0179] Not to be bound by a particular theory, the XTEN of the GLP2-XTEN compositions with the higher net negative charge are expected to have less non-specific interactions with various negatively-charged surfaces such as blood vessels, tissues, or various receptors, which would further contribute to reduced active clearance. Conversely, it is believed that the XTEN of the GLP2-XTEN compositions with a low (or no) net charge would have a higher degree of interaction with surfaces that can potentiate the biological activity of the associated GLP-2, given the known contribution of phagocytic cells in the inflammatory process in the intestines.

[0180] In other cases, where no net charge is desired, the XTEN can be selected from, for example, AG family XTEN components, such as the AG motifs of Table 3, or those AM motifs of Table 3 that have approximately no net charge. Non-limiting examples of AG XTEN include, but are not limited to AG42, AG144, AG288, AG576, and AG864 polypeptide sequences of Tables 4 and 11, or fragments thereof. In another embodiment, the XTEN can comprise varying proportions of AE and AG motifs (in order to have a net charge that is deemed optimal for a given use or to maintain a given physicochemical property.

[0181] The XTEN of the compositions of the present invention generally have no or a low content of positively charged amino acids. In some embodiments, the XTEN may have less than about 10% amino acid residues with a positive charge, or less than about 7%, or less than about 5%, or less than about 2%, or less than about 1% amino acid residues with a positive charge. However, the invention contemplates constructs where a limited number of amino acids with a positive charge, such as lysine, are incorporated into XTEN to permit conjugation between the epsilon amine of the lysine and a reactive group on a GLP-2 peptide, a linker bridge, or a reactive group on a drug or small molecule to be conjugated to the XTEN backbone. In one embodiment of the foregoing, the XTEN has between about 1 to about 100 lysine residues, or about 1 to about 70 lysine residues, or about 1 to about 50 lysine residues, or about 1 to about 30 lysine residues, or about 1 to about 20 lysine residues, or about 1 to about 10 lysine residues, or about 1 to about 5 lysine residues, or alternatively only a single lysine residue. Using the foregoing lysine-containing XTEN, fusion proteins are constructed that comprises XTEN, a GLP-2, plus a chemotherapeutic agent useful in the treatment of GLP-2-related diseases or disorders, wherein the maximum number of molecules of the agent incorporated into the XTEN component is determined by the numbers of lysines or other amino acids with reactive side chains (e.g., cysteine) incorporated into the XTEN. Accordingly, the invention also provides XTEN with 1 to about 10 cysteine residues, or about 1 to about 5 cysteine residues, or alternatively only a single cysteine residue wherein fusion proteins are constructed that comprises XTEN, a GLP-2, plus a chemotherapeutic agent useful in the treatment of GLP-2-related diseases or disorders, wherein the maximum number of molecules of the agent incorporated into the XTEN component is determined by the numbers of cysteines.

[0182] As hydrophobic amino acids impart structure to a polypeptide, the invention provides that the content of hydrophobic amino acids in the XTEN will typically be less than 5%, or less than 2%, or less than 1% hydrophobic amino acid content. In one embodiment, the amino acid content of methionine and tryptophan in the XTEN component of a GLP2-XTEN fusion protein is typically less than 5%, or less than 2%, and most preferably less than 1%. In another embodiment, the XTEN will have a sequence that has less than 10% amino acid residues with a positive charge, or less than about 7%, or less that about 5%, or less than about 2% amino acid residues with a positive charge, the sum of methionine and tryptophan residues will be less than 2%, and the sum of asparagine and glutamine residues will be less than 5% of the total XTEN sequence.

[0183] 5. Low Immunogenicity

[0184] In another aspect, the invention provides compositions in which the XTEN sequences have a low degree of immunogenicity or are substantially non-immunogenic. Several factors can contribute to the low immunogenicity of XTEN, e.g., the non-repetitive sequence, the unstructured conformation, the high degree of solubility, the low degree or lack of self-aggregation, the low degree or lack of proteolytic sites within the sequence, and the low degree or lack of epitopes in the XTEN sequence.

[0185] Conformational epitopes are formed by regions of the protein surface that are composed of multiple discontinuous amino acid sequences of the protein antigen. The precise folding of the protein brings these sequences into a well-defined, stable spatial configurations, or epitopes, that can be recognized as “foreign” by the host humoral immune system, resulting in the production of antibodies to the protein or the activation of a cell-mediated immune response. In the latter case, the immune response to a protein in an individual is heavily influenced by T-cell epitope recognition that is a function of the peptide binding specificity of that individual's HLA-DR allotype. Engagement of a MHC Class II peptide complex by a cognate T-cell receptor on the surface of the T-cell, together with the cross-binding of certain other co-receptors such as the CD4 molecule, can induce an activated state within the T-cell. Activation leads to the release of cytokines further activating other lymphocytes such as B cells to produce antibodies or activating T killer cells as a full cellular immune response.

[0186] The ability of a peptide to bind a given MHC Class II molecule for presentation on the surface of an APC (antigen presenting cell) is dependent on a number of factors; most notably its primary sequence. In one embodiment, a lower degree of immunogenicity is achieved by designing XTEN sequences that resist antigen processing in antigen presenting cells, and/or choosing sequences that do not bind MHC receptors well. The invention provides GLP2-XTEN fusion proteins with substantially non-repetitive XTEN polypeptides designed to reduce binding with MHC II receptors, as well as avoiding formation of epitopes for T-cell receptor or antibody binding, resulting in a low degree of immunogenicity. Avoidance of immunogenicity can attribute to, at least in part, a result of the conformational flexibility of XTEN sequences; i.e., the lack of secondary structure due to the selection and order of amino acid residues. For example, of particular interest are sequences having a low tendency to adapt compactly folded conformations in aqueous solution or under physiologic conditions that could result in conformational epitopes. The administration of fusion proteins comprising XTEN, using conventional therapeutic practices and dosing, would generally not result in the formation of neutralizing antibodies to the XTEN sequence, and also reduce the immunogenicity of the GLP-2 fusion partner in the GLP2-XTEN compositions.

[0187] In one embodiment, the XTEN sequences utilized in the subject fusion proteins can be substantially free of epitopes recognized by human T cells. The elimination of such epitopes for the purpose of generating less immunogenic proteins has been disclosed previously; see for example WO 98/52976, WO 02/079232, and WO 00/3317 which are incorporated by reference herein. Assays for human T cell epitopes have been described (Stickler, M., et al. (2003) J Immunol Methods, 281: 95-108). Of particular interest are peptide sequences that can be oligomerized without generating T cell epitopes or non-human sequences. This is achieved by testing direct repeats of these sequences for the presence of T-cell epitopes and for the occurrence of 6 to 15-mer and, in particular, 9-mer sequences that are not human, and then altering the design of the XTEN sequence to eliminate or disrupt the epitope sequence. In some embodiments, the XTEN sequences are substantially non-immunogenic by the restriction of the numbers of epitopes of the XTEN predicted to bind MHC receptors. With a reduction in the numbers of epitopes capable of binding to MHC receptors, there is a concomitant reduction in the potential for T cell activation as well as T cell helper function, reduced B cell activation or upregulation and reduced antibody production. The low degree of predicted T-cell epitopes can be determined by epitope prediction algorithms such as, e.g., TEPITOPE (Sturniolo, T., et al. (1999) Nat Biotechnol, 17: 555-61), as shown in Example 31. The TEPITOPE score of a given peptide frame within a protein is the log of the K_{d} (dissociation constant, affinity, off-rate) of the binding of that peptide frame to multiple of the most common human MHC alleles, as disclosed in Sturniolo, T. et al. (1999) Nature Biotechnology 17:555). The score ranges over at least 20 logs, from about 10 to about −10 (corresponding to binding constraints of 10e¹⁰ K_{d} to 10e⁻¹⁰ K_{d}), and can be reduced by avoiding hydrophobic amino acids that serve as anchor residues during peptide display on MHC, such as M, I, L, V, F. In some embodiments, an XTEN component incorporated into a GLP2-XTEN does not have a predicted T-cell epitope at a TEPITOPE threshold score of about −5, or −6, or −7, or −8, or −9, or at a TEPITOPE score of −10. As used herein, a score of “−9” would be a more stringent TEPITOPE threshold than a score of −5.

[0188] In another embodiment, the inventive XTEN sequences, including those incorporated into the subject GLP2-XTEN fusion proteins, are rendered substantially non-immunogenic by the restriction of known proteolytic sites from the sequence of the XTEN, reducing the processing of XTEN into small peptides that can bind to MHC II receptors. In another embodiment, the XTEN sequence is rendered substantially non-immunogenic by the use a sequence that is substantially devoid of secondary structure, conferring resistance to many proteases due to the high entropy of the structure. Accordingly, the reduced TEPITOPE score and elimination of known proteolytic sites from the XTEN render the XTEN compositions, including the XTEN of the GLP2-XTEN fusion protein compositions, substantially unable to be bound by mammalian receptors, including those of the immune system. In one embodiment, an XTEN of a GLP2-XTEN fusion protein can have >100 nM K_{d} binding to a mammalian receptor, or greater than 500 nM K_{d}, or greater than 1 μM K_{d} towards a mammalian cell surface or circulating polypeptide receptor.

[0189] Additionally, the non-repetitive sequence and corresponding lack of epitopes of XTEN limit the ability of B cells to bind to or be activated by XTEN. A repetitive sequence is recognized and can form multivalent contacts with even a few B cells and, as a consequence of the cross-linking of multiple T-cell independent receptors, can stimulate B cell proliferation and antibody production. In contrast, while a XTEN can make contacts with many different B cells over its extended sequence, each individual B cell may only make one or a small number of contacts with an individual XTEN due to the lack of repetitiveness of the sequence. Not being to be bound by any theory, XTENs typically have a much lower tendency to stimulate proliferation of B cells and thus an immune response. In one embodiment, the GLP2-XTEN have reduced immunogenicity as compared to the corresponding GLP-2 that is not fused to an XTEN. In one embodiment, the administration of up to three parenteral doses of a GLP2-XTEN to a mammal result in detectable anti-GLP2-XTEN IgG at a serum dilution of 1:100 but not at a dilution of 1:1000. In another embodiment, the administration of up to three parenteral doses of a GLP2-XTEN to a mammal result in detectable anti-GLP-2 IgG at a serum dilution of 1:1000 but not at a dilution of 1:10,000. In another embodiment, the administration of up to three parenteral doses of a GLP2-XTEN to a mammal result in detectable anti-XTEN IgG at a serum dilution of 1:10,000 but not at a dilution of 1:1,000,000. In the foregoing embodiments, the mammal can be a mouse, a rat, a rabbit, or a cynomolgus monkey.

[0190] An additional feature of XTENs with non-repetitive sequences relative to sequences with a high degree of repetitiveness is non-repetitive XTENs form weaker contacts with antibodies. Antibodies are multivalent molecules. For instance, IgGs have two identical binding sites and IgMs contain 10 identical binding sites. Thus antibodies against repetitive sequences can form multivalent contacts with such repetitive sequences with high avidity, which can affect the potency and/or elimination of such repetitive sequences. In contrast, antibodies against non-repetitive XTENs may yield monovalent interactions, resulting in less likelihood of immune clearance such that the GLP2-XTEN compositions can remain in circulation for an increased period of time.

[0191] 6. Increased Hydrodynamic Radius

[0192] In another aspect, the present invention provides XTEN in which the XTEN polypeptides have a high hydrodynamic radius that confers a corresponding increased apparent molecular weight to the GLP2-XTEN fusion protein incorporating the XTEN. As detailed in Example 25, the linking of XTEN to therapeutic protein sequences results in GLP2-XTEN compositions that can have increased hydrodynamic radii, increased apparent molecular weight, and increased apparent molecular weight factor compared to a therapeutic protein not linked to an XTEN. For example, in therapeutic applications in which prolonged half-life is desired, compositions in which a XTEN with a high hydrodynamic radius is incorporated into a fusion protein comprising a therapeutic protein can effectively enlarge the hydrodynamic radius of the composition beyond the glomerular pore size of approximately 3-5 nm (corresponding to an apparent molecular weight of about 70 kDA) (Caliceti. 2003. Pharmacokinetic and biodistribution properties of poly(ethylene glycol)-protein conjugates. Adv Drug Deliv Rev 55:1261-1277), resulting in reduced renal clearance of circulating proteins with a corresponding increase in terminal half-life and other enhanced pharmacokinetic properties. The hydrodynamic radius of a protein is determined by its molecular weight as well as by its structure, including shape or compactness. Not to be bound by a particular theory, the XTEN can adopt open conformations due to electrostatic repulsion between individual charges of the peptide or the inherent flexibility imparted by the particular amino acids in the sequence that lack potential to confer secondary structure. The open, extended and unstructured conformation of the XTEN polypeptide can have a greater proportional hydrodynamic radius compared to polypeptides of a comparable sequence length and/or molecular weight that have secondary and/or tertiary structure, such as typical globular proteins. Methods for determining the hydrodynamic radius are well known in the art, such as by the use of size exclusion chromatography (SEC), as described in U.S. Pat. Nos. 6,406,632 and 7,294,513. As the results of Example 25 demonstrate, the addition of increasing lengths of XTEN results in proportional increases in the parameters of hydrodynamic radius, apparent molecular weight, and apparent molecular weight factor, permitting the tailoring of GLP2-XTEN to desired characteristic cut-off apparent molecular weights or hydrodynamic radii. Accordingly, in certain embodiments, the GLP2-XTEN fusion protein can be configured with an XTEN such that the fusion protein can have a hydrodynamic radius of at least about 5 nm, or at least about 8 nm, or at least about 10 nm, or 12 nm, or at least about 15 nm. In the foregoing embodiments, the large hydrodynamic radius conferred by the XTEN in a GLP2-XTEN fusion protein can lead to reduced renal clearance of the resulting fusion protein, leading to a corresponding increase in terminal half-life, an increase in mean residence time, and/or a decrease in renal clearance rate.

[0193] When the molecular weights of the GLP2-XTEN fusion proteins are derived from size exclusion chromatography analyses, the open conformation of the XTEN due to the low degree of secondary structure results in an increase in the apparent molecular weight of the fusion proteins. In some embodiments the GLP2-XTEN comprising a GLP-2 and at least a first or multiple XTEN exhibits an apparent molecular weight of at least about 200 kDa, or at least about 400 kDa, or at least about 500 kDa, or at least about 700 kDa, or at least about 1000 kDa, or at least about 1400 kDa. Accordingly, the GLP2-XTEN fusion proteins comprising one or more XTEN exhibit an apparent molecular weight that is about 2-fold greater, or about 3-fold greater or about 4-fold greater, or about 8-fold greater, or about 10-fold greater, or about 12-fold greater, or about 15-fold greater, or about 20-fold greater than the actual molecular weight of the fusion protein. In one embodiment, the isolated GLP2-XTEN fusion protein of any of the embodiments disclosed herein exhibit an apparent molecular weight factor under physiologic conditions that is greater than about 2, or about 3, or about 4, or about 5, or about 6, or about 7, or about 8, or about 10, or about 15, or greater than about 20. In another embodiment, the GLP2-XTEN fusion protein has, under physiologic conditions, an apparent molecular weight factor that is about 3 to about 20, or is about 5 to about 15, or is about 8 to about 14, or is about 10 to about 12 relative to the actual molecular weight of the fusion protein.

### IV). Glp2-Xten Compositions

[0194] The present invention relates in part to fusion protein compositions comprising GLP-2 linked to one or more XTEN, wherein the fusion protein would act to replace or augment existing GLP-2 when administered to a subject. The invention addresses a long-felt need in increasing the terminal half-life of exogenously administered GLP-2 to a subject in need thereof. One way to increase the circulation half-life of a therapeutic protein is to ensure that renal clearance of the protein is reduced. Another way to increase the circulation half-life is to reduce the active clearance of the therapeutic protein, whether mediated by receptors, active metabolism of the protein, or other endogenous mechanisms. Both may be achieved by conjugating the protein to a polymer, which, in some cases, is capable of conferring an increased molecular size (or hydrodynamic radius) to the protein and, hence, reduced renal clearance, and, in other cases, interferes with binding of the protein to clearance receptors or other proteins that contribute to metabolism or clearance. Thus, certain objects of the present invention include, but are not limited to, providing improved GLP-2 molecules with a longer circulation or terminal half-life, decreasing the number or frequency of necessary administrations of GLP-2 compositions, retaining at least a portion of the biological activity of the native GLP-2, and enhancing the ability to treat GLP-2-related diseases or gastrointestinal conditions with resulting improvement in clinical symptoms and overall well-being more efficiently, more effectively, more economically, and with greater safety compared to presently available GLP-2 preparations.

[0195] To meet these needs, in a first aspect, the invention provides isolated fusion protein compositions comprising a biologically active GLP-2 covalently linked to one or more XTEN, resulting in a GLP2-XTEN fusion protein composition. The subject GLP-2-XTEN can mediate one or more biological or therapeutic activities of a wild-type GLP-2. GLP2-XTEN can be produced recombinantly or by chemical conjugation of a GLP-2 to and XTEN. In one embodiment, the GLP-2 is native GLP-2. In another embodiment, the GLP-2 is a sequence variant of a natural sequence that retains at least a portion of the biological activity of the native GLP-2. In one embodiment, the GLP-2 is a sequence having at least 90%, or at least about 91%, or at least about 92%, or at least about 93%, or at least about 94%, or at least about 95%, or at least about 96%, or at least about 97%, or at least about 98%, or at least about 99%, or 100% sequence identity to a sequence selected from the group consisting of the sequences in Table 1, when optimally aligned. In another embodiment, the GLP-2 is a sequence variant with glycine substituted for alanine at residue number 2 of the mature GLP-2 peptide. In one embodiment, the GLP2-XTEN comprises a GLP-2 having the sequence HGDGSFSDEMNTILDNLAARDFINWLIQTKITD (SEQ ID NO: 1). In one embodiment, the invention provides GLP2-XTEN fusion proteins comprising GLP-2 N- and/or C-terminally modified forms comprising one or more XTEN.

[0196] The GLP-2 of the subject compositions, particularly those disclosed in Table 1, together with their corresponding nucleic acid and amino acid sequences, are well known in the art and descriptions and sequences are available in public databases such as Chemical Abstracts Services Databases (e.g., the CAS Registry), GenBank, The Universal Protein Resource (UniProt) and subscription provided databases such as GenSeq (e.g., Derwent). Polynucleotide sequences may be a wild type polynucleotide sequence encoding a given GLP-2 (e.g., either full length or mature), or in some instances the sequence may be a variant of the wild type polynucleotide sequence (e.g., a polynucleotide which encodes the wild type biologically active protein, wherein the DNA sequence of the polynucleotide has been optimized, for example, for expression in a particular species; or a polynucleotide encoding a variant of the wild type protein, such as a site directed mutant or an allelic variant. It is well within the ability of the skilled artisan to use a wild-type or consensus cDNA sequence or a codon-optimized sequence variant of a GLP-2 to create GLP2-XTEN constructs contemplated by the invention using methods known in the art and/or in conjunction with the guidance and methods provided herein and described more fully in the Examples.

[0197] In some embodiments, the GLP2-XTEN fusion proteins retain at least a portion of the biological activity of native GLP-2. A GLP2-XTEN fusion protein of the invention is capable of binding and activating a GLP-2 receptor. In one embodiment, the GLP2-XTEN fusion protein of the present invention has an EC₅₀ value, when assessed using an in vitro GLP-2 receptor binding assay such as described herein or others known in the art, of less than about 30 nM, or about 100 nM, or about 200 nM, or about 300 nM, or about 400 nM, or about 500 nM, or about 600 nM, or about 700 nM, or about 800 nM, or about 1000 nM, or about 1200 nM, or about 1400 nM. In another embodiment, the GLP2-XTEN fusion protein of the present invention retains at least about 1%, or about 2%, or about 3%, or about 4%, or about 5%, or about 10%, or about 20%, or about 30% of the potency of the corresponding GLP-2 not linked to XTEN when assayed using an in vitro GLP2R cell assay such as described in the Examples or others known in the art.

[0198] In some embodiments, GLP2-XTEN fusion proteins of the disclosure have intestinotrophic, wound healing and anti-inflammatory activity. In some embodiments, the GLP2-XTEN fusion protein compositions exhibit an improvement in one, two, three or more gastrointestinal-related parameters disclosed herein that are at least about 20%, or 30%, or 40%, or 50%, or 60%, or 70%, or 80%, or 90%, or 100%, or 120%, or 140%, at least about 150% greater compared to the parameter(s) achieved by the corresponding GLP-2 component not linked to the XTEN when administered to a subject. The parameter can be a measured parameter selected from blood concentrations of GLP-2, increased mesenteric blood flow, decreased inflammation, increased weight gain, decreased diarrhea, decreased fecal wet weight, intestinal wound healing, increase in plasma citrulline concentrations, decreased CRP levels, decreased requirement for steroid therapy, enhancing or stimulating mucosal integrity, decreased sodium loss, decreased parenteral nutrition required to maintain body weight, minimizing, mitigating, or preventing bacterial translocation in the intestines, enhancing, stimulating or accelerating recovery of the intestines after surgery, preventing relapses of inflammatory bowel disease, or achieving or maintaining energy homeostasis, among others. In one embodiment, administration of the GLP2-XTEN fusion protein to a subject results in a greater ability to increase small intestine weight and/or length when administered to a subject with a surgically-resected intestine (e.g., short-bowel syndrome) or Crohn's Disease, compared to the corresponding GLP-2 not linked to XTEN and administered at a comparable dose in nmol/kg and dose regimen. In another embodiment, a GLP2-XTEN fusion protein exhibits at least about 10%, or 20%, or 30%, or 40%, or 50%, or 60%, or 70%, or 80%, or at least about 90% greater ability to reduce ulceration when administered to a subject with Crohn's Disease (either naturally acquired or experimentally induced) compared to the corresponding GLP-2 component not linked to the XTEN and administered at a comparable nmol/kg dose and dose regimen. In another embodiment, the fusion protein exhibits the ability to reduce inflammatory cytokines when administered to a subject with Crohn's Disease (either naturally acquired or experimentally induced) by at least about 20%, or 30%, or 40%, or 50%, or 60%, or 70%, or 80%, or at least about 90% compared the corresponding GLP-2 component not linked to the XTEN and administered at a comparable nmol/kg dose and dose regimen. In another embodiment, a GLP2-XTEN fusion protein exhibits at least about 10%, or 20%, or 30%, or 40%, or 50%, or 60%, or 70%, or 80%, or at least about 90% greater ability to reduce mucosal atrophy when administered to a subject with Crohn's Disease (either naturally acquired or experimentally induced; e.g., administration of indomethacin) compared to the corresponding GLP-2 component not linked to the XTEN and administered at a comparable nmol/kg dose and dose regimen. In another embodiment, a GLP2-XTEN fusion protein exhibits at least about 5%, or at least about 6%, or 7%, or 8%, or 9%, or 10%, or 11%, or 12%, or 15%, or at least about 20% greater ability to increase height of intestinal villi when administered to a subject with Crohn's Disease (either naturally acquired or experimentally induced; e.g., administration of indomethacin) compared to the corresponding GLP-2 component not linked to the XTEN and administered at a comparable nmol/kg dose and dose regimen. In another embodiment, a GLP2-XTEN fusion protein exhibits at least about 10%, or 20%, or 30%, or 40%, or 50%, or 60%, or 70%, or 80%, or at least about 90% greater ability to increase body weight when administered to a subject with Crohn's Disease (either naturally acquired or experimentally induced; e.g., administration of indomethacin) compared to the corresponding GLP-2 component not linked to the XTEN and administered at a comparable nmol/kg dose and dose regimen. In the foregoing embodiments of the paragraph, the subject is selected from the group consisting of mouse, rat, monkey and human.

[0199] The compositions of the invention include fusion proteins that are useful, when administered to a subject, for mediating or preventing or ameliorating a gastrointestinal condition associated with GLP-2 such as, but not limited to ulcers, gastritis, digestion disorders, malabsorption syndrome, short-gut syndrome, short bowel syndrome, cul-de-sac syndrome, inflammatory bowel disease, celiac disease, tropical sprue, hypogammaglobulinemic sprue, Crohn's disease, ulcerative colitis, enteritis, chemotherapy-induced enteritis, irritable bowel syndrome, small intestine damage, small intestinal damage due to cancer-chemotherapy, gastrointestinal injury, diarrheal diseases, intestinal insufficiency, acid-induced intestinal injury, arginine deficiency, idiopathic hypospermia, obesity, catabolic illness, febrile neutropenia, diabetes, obesity, steatorrhea, autoimmune diseases, food allergies, hypoglycemia, gastrointestinal barrier disorders, sepsis, bacterial peritonitis, burn-induced intestinal damage, decreased gastrointestinal motility, intestinal failure, chemotherapy-associated bacteremia, bowel trauma, bowel ischemia, mesenteric ischemia, malnutrition, necrotizing enterocolitis, necrotizing pancreatitis, neonatal feeding intolerance, NSAID-induced gastrointestinal damage, nutritional insufficiency, total parenteral nutrition damage to gastrointestinal tract, neonatal nutritional insufficiency, radiation-induced enteritis, radiation-induced injury to the intestines, mucositis associated with cancer chemotherapy and irritable bowel disease, pouchitis, ischemia, and stroke.

[0200] Of particular interest are GLP2-XTEN fusion protein compositions for which an increase in a pharmacokinetic parameter, increased solubility, increased stability, or some other enhanced pharmaceutical property compared to native GLP-2 is obtained, providing compositions with enhanced efficacy, safety, or that result in reduced dosing frequency and/or improve patient management. The GLP2-XTEN fusion proteins of the embodiments disclosed herein exhibit one or more or any combination of the improved properties and/or the embodiments as detailed herein. Thus, the subject GLP2-XTEN fusion protein compositions are designed and prepared with various objectives in mind, including improving the therapeutic efficacy of the bioactive GLP-2 by, for example, increasing the in vivo exposure or the length that the GLP2-XTEN remains within the therapeutic window when administered to a subject, compared to a GLP-2 not linked to XTEN.

[0201] In one embodiment, a GLP2-XTEN fusion protein comprises a single GLP-2 molecule linked to a single XTEN (e.g., an XTEN as described above). In another embodiment, the GLP2-XTEN comprises a single GLP-2 linked to two XTEN, wherein the XTEN may be identical or they may be different. In another embodiment, the GLP2-XTEN fusion protein comprises a single GLP-2 molecule linked to a first and a second XTEN, in which the GLP-2 is a sequence that has at least about 80% sequence identity, or alternatively 81%, 82%, 83%, 84%, 85%, 86%, 87%, 88%, 89%, 90%, 91%, 92%, 93%, 94%, 95%, 96%, 97%, 98%, or at least about 99%, or 100% sequence identity compared to a protein sequence selected from Table 1, and the first and the second XTEN are each sequences that have at least about 80% sequence identity, or alternatively 81%, 82%, 83%, 84%, 85%, 86%, 87%, 88%, 89%, 90%, 91%, 92%, 93%, 94%, 95%, 96%, 97%, 98%, or at least about 99%, or 100% sequence identity compared to one or more sequences selected from Table 4, or fragments thereof. In another embodiment, the GLP2-XTEN fusion protein comprises a sequence with at least about 80% sequence identity, or alternatively 81%, 82%, 83%, 84%, 85%, 86%, 87%, 88%, 89%, 90%, 91%, 92%, 93%, 94%, 95%, 96%, 97%, 98%, or at least about 99%, or 100% sequence identity to a sequence from Table 33 and 34.

[0202] 1. GLP2-XTEN Fusion Protein Configurations

[0203] The invention provides GLP2-XTEN fusion protein compositions with the GLP-2 and XTEN components linked in specific N- to C-terminus configurations.

[0204] In one embodiment of the GLP2-XTEN composition, the invention provides a fusion protein of formula I:

[0205] (GLP-2)-(XTEN) wherein independently for each occurrence, GLP-2 is a GLP-2 protein or variant as defined herein, including sequences having at least about 80%, or at least about 90%, or at least about 95%, or at least about 96%, or at least about 97%, or at least about 98%, or at least about 99% or 100% sequence identity with sequenced from Table 1, and XTEN is an extended recombinant polypeptide as described herein, including, but not limited to sequences having at least about 80%, or at least about 90%, or at least about 95%, or at least about 96%, or at least about 97%, or at least about 98%, or at least about 99% or 100% sequence identity to sequences set forth in Table 4.

[0206] In another embodiment of the GLP2-XTEN composition, the invention provides a fusion protein of formula II:

(XTEN)-(GLP-2) II

[0207] wherein independently for each occurrence, GLP-2 is a GLP-2 protein or variant as defined herein, including sequences having at least about 80%, or at least about 90%, or at least about 95%, or at least about 96%, or at least about 97%, or at least about 98%, or at least about 99% or 100% sequence identity with sequenced from Table 1, and XTEN is an extended recombinant polypeptide as described herein, including, but not limited to sequences having at least about 80%, or at least about 90%, or at least about 95%, or at least about 96%, or at least about 97%, or at least about 98%, or at least about 99% or 100% sequence identity to sequences set forth in Table 4.

[0208] In another embodiment of the GLP2-XTEN composition, the invention provides an isolated fusion protein, wherein the fusion protein is of formula III:

(XTEN)-(GLP-2)-(XTEN) III

wherein independently for each occurrence, GLP-2 is a GLP-2 protein or variant as defined herein, including sequences having at least about 80%, or at least about 90%, or at least about 95%, or at least about 96%, or at least about 97%, or at least about 98%, or at least about 99% or 100% sequence identity with sequenced from Table 1, and XTEN is an extended recombinant polypeptide as described herein, including, but not limited to sequences having at least about 80%, or at least about 90%, or at least about 95%, or at least about 96%, or at least about 97%, or at least about 98%, or at least about 99% or 100% sequence identity to sequences set forth in Table 4.

[0209] In another embodiment of the GLP2-XTEN composition, the invention provides an isolated fusion protein, wherein the fusion protein is of formula IV:

(GLP-2)-(XTEN)-(GLP-2) IV

wherein independently for each occurrence, GLP-2 is a GLP-2 protein or variant as defined herein, including sequences having at least about 80%, or at least about 90%, or at least about 95%, or at least about 96%, or at least about 97%, or at least about 98%, or at least about 99% or 100% sequence identity with sequenced from Table 1, and XTEN is an extended recombinant polypeptide as described herein, including, but not limited to sequences having at least about 80%, or at least about 90%, or at least about 95%, or at least about 96%, or at least about 97%, or at least about 98%, or at least about 99% or 100% sequence identity to sequences set forth in Table 4.

[0210] In another embodiment of the GLP2-XTEN composition, the invention provides an isolated fusion protein, wherein the fusion protein is of formula V:

(GLP-2)-(S)ₓ-(XTEN) V

wherein independently for each occurrence, GLP-2 is a GLP-2 protein or variant as defined herein, including sequences having at least about 80%, or at least about 90%, or at least about 95%, or at least about 96%, or at least about 97%, or at least about 98%, or at least about 99% or 100% sequence identity with sequenced from Table 1; S is a spacer sequence having between 1 to about 50 amino acid residues that can optionally include a cleavage sequence or amino acids compatible with restrictions sites; x is either 0 or 1; and XTEN is an extended recombinant polypeptide as described herein, including, but not limited to sequences having at least about 80%, or at least about 90%, or at least about 95%, or at least about 96%, or at least about 97%, or at least about 98%, or at least about 99% or 100% sequence identity to sequences set forth in Table 4.

[0211] In another embodiment of the GLP2-XTEN composition, the invention provides an isolated fusion protein, wherein the fusion protein is of formula VI:

(XTEN)ₓ-(S)ₓ-(GLP-2)-(S)_{y}-(XTEN)_{y} VI

wherein independently for each occurrence, GLP-2 is a GLP-2 protein or variant as defined herein, including sequences having at least about 80%, or at least about 90%, or at least about 95%, or at least about 96%, or at least about 97%, or at least about 98%, or at least about 99% or 100% sequence identity with sequenced from Table 1; S is a spacer sequence having between 1 to about 50 amino acid residues that can optionally include a cleavage sequence or amino acids compatible with restrictions sites; x is either 0 or 1 and y is either 0 or 1 wherein x+y >1; and XTEN is an extended recombinant polypeptide as described herein, including, but not limited to sequences having at least about 80%, or at least about 90%, or at least about 95%, or at least about 96%, or at least about 97%, or at least about 98%, or at least about 99% or 100% sequence identity to sequences set forth in Table 4.

[0212] The embodiments of formulae I-VI encompass GLP2-XTEN configurations wherein one or more XTEN of lengths ranging from about 36 amino acids to 3000 amino acids (e.g., sequences selected from Table 4 or fragments thereof, or sequences exhibiting at least about 90-95% or more sequence identity thereto) are linked to the N- or C-terminus of the GLP-2. The embodiments of formula V further provide configurations wherein the XTEN are linked to GLP-2 via spacer sequences that can optionally comprise amino acids compatible with restrictions sites or can include cleavage sequences (e.g., the sequences of Tables 5 and 6, described more fully below) such that the XTEN encoding sequence can, in the case of a restriction site, be integrated into a GLP2-XTEN construct and, in the case of a cleavage sequence, the XTEN can be released from the fusion protein by the action of a protease appropriate for the cleavage sequence. In one embodiment of formula V, the fusion protein comprises a spacer sequence that is a single glycine residue.

[0213] 2. GLP2-XTEN Fusion Protein Configurations with Spacer and Cleavage Sequences

[0214] In another aspect, the invention provides GLP2-XTEN configured with one or more spacer sequences incorporated into or adjacent to the XTEN that are designed to incorporate or enhance a functionality or property to the composition, or as an aid in the assembly or manufacture of the fusion protein compositions. Such properties include, but are not limited to, inclusion of cleavage sequence(s), such at TEV or other cleavage sequences of Table 6, to permit release of components, inclusion of amino acids compatible with nucleotide restrictions sites to permit linkage of XTEN-encoding nucleotides to GLP-2-encoding nucleotides or that facilitate construction of expression vectors, and linkers designed to reduce steric hindrance in regions of GLP2-XTEN fusion proteins.

[0215] In an embodiment, a spacer sequence can be introduced between an XTEN sequence and a GLP-2 component to decrease steric hindrance such that the GLP-2 component may assume its desired tertiary structure and/or interact appropriately with its target receptor. For spacers and methods of identifying desirable spacers, see, for example, George, et al. (2003) Protein Engineering 15:871-879, specifically incorporated by reference herein. In one embodiment, the spacer comprises one or more peptide sequences that are between 1-50 amino acid residues in length, or about 1-25 residues, or about 1-10 residues in length. Spacer sequences, exclusive of cleavage sites, can comprise any of the 20 natural L amino acids, and will preferably have XTEN-like properties in that 1) they will comprise hydrophilic amino acids that are satirically unhindered such as, but not limited to, glycine (G), alanine (A), serine (S), threonine (T), glutamate (E), proline (P) and aspartate (D); and 2) will be substantially non-repetitive. In addition, spacer sequences are designed to avoid the introduction of T-cell epitopes; determination of which are described above and in the Examples. In some cases, the spacer can be polyglycines or polyalanines, or is predominately a mixture of combinations of glycine, serine and alanine residues. In one embodiment, a spacer sequence, exclusive of cleavage site amino acids, has about 1 to 10 amino acids that consist of amino acids selected from glycine (G), alanine (A), serine (S), threonine (T), glutamate (E), and proline (P) and are substantially devoid of secondary structure; e.g., less than about 10%, or less than about 5% as determined by the Chou-Fasman and/or GOR algorithms. In one embodiment, the spacer sequence is GPEGPS. In another embodiment, the spacer sequence is a single glycine residue. In another embodiment, the spacer sequence is GPEGPS linked to a cleavage sequence of Table 6.

[0216] In a particular embodiment, the GLP2-XTEN fusion protein comprises one or more spacer sequences linked at the junction(s) between the payload GLP-2 sequence and the one more XTEN incorporated into the fusion protein, wherein the spacer sequences comprise amino acids that are compatible with nucleotides encoding restriction sites. In another embodiment, the GLP2-XTEN fusion protein comprises one or more spacer sequences linked at the junction(s) between the payload GLP-2 sequence and a signal sequence incorporated into the fusion protein, wherein the spacer sequences comprise a cleavage sequence (e.g., TEV) to release the GLP2-XTEN after expression. In another embodiment, the GLP2-XTEN fusion protein comprises one or more spacer sequences linked at the junction(s) between the payload GLP-2 sequence and the one more XTEN incorporated into the fusion protein wherein the spacer sequences comprise amino acids that are compatible with nucleotides encoding restriction sites and the amino acids and the one more spacer sequence amino acids are chosen from glycine (G), alanine (A), serine (S), threonine (T), glutamate (E), and proline (P). In another embodiment, the GLP2-XTEN fusion protein comprises one or more spacer sequences linked at the junction(s) between the payload GLP-2 sequence and the one more XTEN incorporated into the fusion protein wherein the spacer sequences comprise amino acids that are compatible with nucleotides encoding restriction sites and the one more spacer sequences are chosen from the sequences of Table 5. The exact sequence of each spacer sequence is chosen to be compatible with cloning sites in expression vectors that are used for a particular GLP2-XTEN construct. For embodiments in which a single XTEN is attached to the N- or C-terminus, only a single spacer sequence at the junction of the two components would be required. As would be apparent to one of ordinary skill in the art, the spacer sequences comprising amino acids compatible with restriction sites could be omitted from the construct when an entire GLP2-XTEN gene is synthetically generated, rather than ligated using GLP-2 and XTEN encoding genes.

TABLE 5
Spacer Sequences Compatible with Restriction Sites

| Spacer Sequence | SEQ ID NO: | Restriction Enzyme |
|---|---|---|
| GSPG | 181 | BsaI |
| ETET | 182 | BsaI |
| PGSSS | 183 | BbsI |
| GAP | | AscI |
| GPA | | FseI |
| GPSGP | 184 | SfiI |
| AAA | | SacII |
| TG | | AgeI |
| GT | | KpnI |
| GAGSPGAETA | 185 | SfiI |
| ASS | | XhoI |

[0217] In another aspect, the present invention provides GLP2-XTEN configurations with cleavage sequences incorporated into the spacer sequences. In some embodiments, a spacer sequence in a GLP2-XTEN fusion protein composition comprises one or more cleavage sequences, which are identical or different, wherein the cleavage sequence may be acted on by a protease to release the XTEN sequence(s) from the fusion protein. In one embodiment, the incorporation of the cleavage sequence into the GLP2-XTEN is designed to permit release of a GLP-2 that becomes active or more active upon its release from the XTEN component. The cleavage sequences are located sufficiently close to the GLP-2 sequences, generally within 18, or within 12, or within 6, or within 2 amino acids of the GLP-2 sequence, such that any remaining residues attached to the GLP-2s after cleavage do not appreciably interfere with the activity (e.g., such as binding to a GLP-2 receptor) of the GLP-2, yet provide sufficient access to the protease to be able to effect cleavage of the cleavage sequence. In some cases, the GLP2-XTEN comprising the cleavage sequences will also have one or more spacer sequence amino acids between the GLP-2 and the cleavage sequence or the XTEN and the cleavage sequence to facilitate access of the protease to the cleavage sequence; the spacer amino acids comprising any natural amino acid, including glycine, serine and alanine as preferred amino acids. In one embodiment, the cleavage site is a sequence that can be cleaved by a protease endogenous to the mammalian subject such that the GLP2-XTEN can be cleaved after administration to a subject. In such case, the GLP2-XTEN can serve as a prodrug or a circulating depot for the GLP-2. In a particular construct of the foregoing, the GLP2-XTEN would have one or two XTEN linked to the N- and/or the C-terminus such that the XTEN could be released, leaving the active form of GLP-2 free. In one embodiment of the foregoing construct, the GLP-2 that is released from the fusion protein by cleavage of the cleavage sequence exhibits at least about a two-fold, or at least about a three-fold, or at least about a four-fold, or at least about a five-fold, or at least about a six-fold, or at least about a eight-fold, or at least about a ten-fold, or at least about a 20-fold increase in biological activity compared to the intact GLP2-XTEN fusion protein.

[0218] Examples of cleavage sites contemplated by the invention include, but are not limited to, a polypeptide sequence cleavable by a mammalian endogenous protease selected from FXIa, FXIIa, kallikrein, FVIIIa, FVIIIa, FXa, FIIa (thrombin), Elastase-2, granzyme B, MMP-12, MMP-13, MMP-17 or MMP-20, or by non-mammalian proteases such as TEV, enterokinase, PreScission™ protease (rhinovirus 3C protease), and sortase A. Sequences known to be cleaved by the foregoing proteases and others are known in the art. Exemplary cleavage sequences contemplated by the invention and the respective cut sites within the sequences are presented in Table 6, as well as sequence variants thereof. Thus, cleavage sequences, particularly those of Table 6 that are susceptible to the endogenous proteases present during inflammation would provide for release of GLP-2 that, in certain embodiments of the GLP2-XTEN, provide a higher degree of activity for the GLP-2 component released from the intact form of the GLP2-XTEN, as well as additional safety margin for high doses of GLP2-XTEN administered to a subject. For example, it has been demonstrated that many of the metaloproteinases are elevated in Crohn's Disease and inflamed intestines (D Schuppan and T Freitag. Fistulising Crohn's disease: MMPs gone awry. Gut (2004) 53(5): 622-624). In one embodiment, the invention provides GLP2-XTEN comprising one or more cleavage sequences operably positioned to release the GLP-2 from the fusion protein upon cleavage, wherein the one or more cleavage sequences has at least about 86%, or at least about 92% or greater sequence identity to a sequence selected from Table 6. In another embodiment, the GLP2-XTEN comprising a cleavage sequence would have at least about 80%, or at least about 85%, or at least about 90%, or at least about 95%, or at least about 96%, or at least about 97%, or at least about 98%, or at least about 99% sequence identity compared to a sequence selected from Table 34.

[0219] In some embodiments, only the two or three amino acids flanking both sides of the cut site (four to six amino acids total) are incorporated into the cleavage sequence that, in turn, is incorporated into the GLP2-XTEN of the embodiments. In other embodiments, the incorporated cleavage sequence of Table 6 can have one or more deletions or insertions or one or two or three amino acid substitutions for any one or two or three amino acids in the known sequence, wherein the deletions, insertions or substitutions result in reduced or enhanced susceptibility but not an absence of susceptibility to the protease, resulting in an ability to tailor the rate of release of the GLP-2 from the XTEN. Exemplary substitutions are shown in Table 6.

TABLE 6
Protease Cleavage Sequences

| | Exemplary | | | |
|---|---|---|---|---|
| Protease Acting | Cleavage | SEQ ID | | SEQ ID |
| Upon Sequence | Sequence | NO: | Minimal Cut Site* | NO: |
| FXIa | KLTR↓AET | 186 | KD/FL/T/R↓VA/VE/GT/GV | |
| FXIa | DFTR↓VVG | 187 | KD/FL/T/R↓VA/VE/GT/GV | |
| FXIIa | TMTR↓IVGG | 188 | NA | |
| Kallikrein | SPFR↓STGG | 189 | —/—/FL/RY↓SR/RT/—/— | |
| FVIIa | LQVR↓IVGG | 190 | NA | |
| FIXa | PLGR↓IVGG | 191 | —/—/G/R↓—/—/—/— | |
| FXa | IEGR↓TVGG | 192 | IA/E/GFP/R↓STI/VFS/—/G | |
| FIIa (thrombin) | LTPR↓SLLV | 193 | —/—/PLA/R↓SAG/—/—/— | |
| Elastase-2 | LGPV↓SGVP | 194 | —/—/—/VIAT↓—/—/—/— | |
| Granzyme-B | VAGD↓SLEE | 195 | V/—/—/D↓—/—/—/— | |
| MMP-12 | GPAG↓LGGA | 196 | G/PA/—/G↓L/—/G/— | 197 |
| MMP-13 | GPAG↓LRGA | 198 | G/P/—/G↓L/—/GA/— | 199 |
| MMP-17 | APLG↓LRLR | 200 | —/PS/—/—↓LQ/—/LT/— | |
| MMP-20 | PALP↓LVAQ | 201 | NA | |
| TEV | ENLYFQ↓G | 202 | ENLYFQ↓G/S | 203 |
| Enterokinase | DDDK↓IVGG | 204 | DDDK↓IVGG | 205 |
| Protease 3C | LEVLFQ↓GP | 206 | LEVLFQ↓GP | 207 |
| (PreScission™) | | | | |
| Sortase A | LPKT↓GSES | 208 | L/P/KEAD/T↓G/—/EKS/S | 209 |

↓indicates cleavage site
NA: not applicable
*the listing of multiple amino acids before, between, or after a slash indicate alternative amino acids that can be substituted at the position;
“—” indicates that any amino acid may be substituted for the corresponding amino acid indicated in the middle column

[0220] 3. Exemplary GLP2-XTEN Fusion Protein Sequences

[0221] Non-limiting examples of sequences of fusion proteins containing a single GLP-2 linked to one or two XTEN, either joined at the N- or C-termini are presented in Tables 13 and 32. In one embodiment, a GLP2-XTEN composition would comprise a fusion protein having at least about 80% sequence identity compared to a GLP2-XTEN selected from Table 13 or Table 33, alternatively at least about 81%, 82%, 83%, 84%, 85%, 86%, 87%, 88%, 89%, 90%, 91%, 92%, 93%, 94%, 95%, 96%, 97%, 98%, 99%, or about 100% sequence identity as compared to a GLP2-XTEN from Table 13 or Table 33. However, the invention also contemplates substitution of any of the GLP-2 sequences of Table 1 for a GLP-2 component of the GLP2-XTEN of Table 13 or Table 33, and/or substitution of any sequence of Table 4 for an XTEN component of the GLP2-XTEN of Table 13 or Table 33. In preferred embodiments, the resulting GLP2-XTEN of the foregoing examples retain at least a portion of the biological activity of the corresponding GLP-2 not linked to the XTEN; e.g., the ability to bind and activate a GLP-2 receptor and/or result in an intestinotrophic, proliferative, or wound-healing effect. In the foregoing fusion proteins hereinabove described in this paragraph, the GLP2-XTEN fusion protein can further comprise one or more cleavage sequences; e.g., a sequence from Table 6, the cleavage sequence being located between the GLP-2 and the XTEN. In some embodiments comprising cleavage sequence(s), the intact GLP2-XTEN composition has less biological activity but a longer half-life in its intact form compared to a corresponding GLP-2 not linked to the XTEN, but is designed such that upon administration to a subject, the GLP-2 component is gradually released from the fusion protein by cleavage at the cleavage sequence(s) by endogenous proteases, whereupon the GLP-2 component exhibits activity, i.e., the ability to effectively bind to the GLP-2 receptor. In non-limiting examples, the GLP2-XTEN with a cleavage sequence has about 80% sequence identity compared to a sequence from Table 34, or about 85%, or about 90%, or about 95%, or about 97%, or about 98%, or about 99% sequence identity compared to a sequence from Table 34. However, the invention also contemplates substitution of any of the GLP-2 sequences of Table 1 for a GLP-2 component of the GLP2-XTEN of Table 34, substitution of any sequence of Table 4 for an XTEN component of the GLP2-XTEN of Table 34, and substitution of any cleavage sequence of Table 6 for a cleavage component of the GLP2-XTEN of Table 34. In some cases, the GLP2-XTEN of the foregoing embodiments in this paragraph serve as prodrugs or a circulating depot, resulting in a longer terminal half-life compared to GLP-2 not linked to the XTEN. In such cases, a higher concentration of GLP2-XTEN can be administered to a subject to maintain therapeutic blood levels for an extended period of time compared to the corresponding GLP-2 not linked to XTEN because a smaller proportion of the circulating composition is active.

[0222] The GLP2-XTEN compositions of the embodiments can be evaluated for biological activity using assays or in vivo parameters as described herein (e.g., assays of the Examples or assays of Table 32), or a pharmacodynamic effect in a preclinical model of GLP-2 deficiency or in clinical trials in humans, using methods as described in the Examples or other methods known in the art for assessing GLP-2 biological activity to determine the suitability of the configuration or the GLP-2 sequence variant, and those GLP2-XTEN compositions (including after cleavage of any incorporated XTEN-releasing cleavage sites) that retain at least about 40%, or about 50%, or about 55%, or about 60%, or about 70%, or about 80%, or about 90%, or about 95% or more biological activity compared to native GLP-2 sequence are considered suitable for use in the treatment of GLP-2-related conditions.

### V). Properties of the Glp2-Xten Compositions of the Invention

[0223] (a) Pharmacokinetic Properties of GLP2-XTEN

[0224] It is an object of the present invention to provide GLP2-XTEN fusion proteins with enhanced pharmacokinetics compared to GLP-2 not linked to the XTEN. The pharmacokinetic properties of a GLP-2 that can be enhanced by linking a given XTEN to the GLP-2 include, but are not limited to, terminal half-life, area under the curve (AUC), Cₘₐₓ, volume of distribution, maintaining the biologically active GLP2-XTEN within the therapeutic window above the minimum effective dose or blood unit concentration for a longer period of time compared to the GLP-2 not linked to XTEN, and bioavailability; properties that permits less frequent dosing or an enhanced pharmacologic effect, resulting in enhanced utility in the treatment of gastrointestinal conditions.

[0225] Native GLP-2 has been reported to have a terminal half-life in humans of approximately seven minutes (Jeppesen P B, et al., Teduglutide (ALX-0600), a dipeptidyl peptidase IV resistant glucagon-like peptide 2 analogue, improves intestinal function in short bowel syndrome patients. Gut. (2005) 54(9):1224-1231; Hartmann B, et al. (2000) Dipeptidyl peptidase IV inhibition enhances the intestinotrophic effect of glucagon-like peptide-2 in rats and mice. Endocrinology 141:4013-4020), while an analog teduglutide exhibited a terminal half-life of approximately 0.9-2.3 hr in humans (Marier J F, Population pharmacokinetics of teduglutide following repeated subcutaneous administrations in healthy participants and in patients with short bowel syndrome and Crohn's disease. J Clin Pharmacol. (2010) 50(1):36-49). It will be understood by the skilled artisan that the pharmacokinetic properties of the GLP2-XTEN embodiments are to be compared to comparable forms of GLP-2 not linked to the XTEN, i.e., recombinant, native sequence or a teduglutide-like analog.

[0226] As a result of the enhanced properties conferred by XTEN, the GLP2-XTEN, when used at the dose and dose regimen determined to be appropriate for the composition by the methods described herein, administration of a GLP2-XTEN fusion protein composition can achieve a circulating concentration resulting in a desired pharmacologic or clinical effect for an extended period of time compared to a comparable dose of the corresponding GLP-2 not linked to the XTEN. As used herein, a “comparable dose” means a dose with an equivalent moles/kg for the active GLP-2 pharmacophore (e.g., GLP-2) that is administered to a subject in a comparable fashion. It will be understood in the art that a “comparable dosage” of GLP2-XTEN fusion protein would represent a greater weight of agent but would have essentially the same mole-equivalents of GLP-2 in the dose of the fusion protein administered.

[0227] In one embodiment, the invention provides GLP2-XTEN that enhance the pharmacokinetics of the fusion protein by linking one or more XTEN to the GLP-2 component of the fusion protein, wherein the fusion protein has an increase in apparent molecular weight factor of at least about two-fold, or at least about three-fold, or at least about four-fold, or at least about five-fold, or at least about six-fold, or at least about seven-fold, or at least about eight-fold, or at least about ten-fold, or at least about twelve-fold, or at least about fifteen-fold, and wherein the terminal half-life of the GLP2-XTEN when administered to a subject is increased at least about 2-fold, or at least about 3-fold, or at least about 4-fold, or at least about 5-fold, or at least about 6-fold, or at least about 7-fold, or at least about 8-fold, or at least about 10-fold or more compared to the corresponding GLP-2 not linked to the XTEN. In the foregoing embodiment, wherein the fusion protein comprises at least two XTEN molecules incorporated into the GLP2-XTEN, the XTEN can be identical or they can be of a different sequence composition (and net charge) or length. The XTEN can have at least about 80% sequence identity, or at least about 90%, or at least about 95%, or at least about 98%, or at least about 99% sequence identity compared to a sequence selected from Table 4. Not to be bound by a particular theory, the XTEN of the GLP2-XTEN compositions with the higher net charge are expected, as described above, to have less non-specific interactions with various negatively-charged surfaces such as blood vessels, tissues, or various receptors, which would further contribute to reduced active clearance. Conversely, the XTEN of the GLP2-XTEN compositions with a low (or no) net charge are expected to have a higher degree of interaction with surfaces that potentiate the biological activity of the associated GLP-2, given the known association of inflammatory cells in the intestines during an inflammatory response. Thus, the invention provides GLP2-XTEN in which the degree of potency, bioavailability, and half-life of the fusion protein can be tailored by the selection and placement of the type and length of the XTEN in the GLP2-XTEN compositions. Accordingly, the invention contemplates compositions in which a GLP-2 from Table 1 and XTEN from Table 4 are combined and are produced, for example, in a configuration selected from any one of formulae I-VI such that the construct has enhanced pharmacokinetic properties and reduced systemic clearance. The invention further takes advantage of the fact that certain ligands with reduced binding to a clearance receptor, either as a result of a decreased on-rate or an increased off-rate, may be effected by the obstruction of either the N- or C-terminus and using that terminus as the linkage to another polypeptide of the composition, whether another molecule of a GLP-2, an XTEN, or a spacer sequence results in the reduced binding. The choice of the particular configuration of the GLP2-XTEN fusion protein can be tested by methods disclosed herein to confirm those configurations that reduce the degree of binding to a clearance receptor such that a reduced rate of active clearance is achieved.

[0228] In one embodiment, the invention provides GLP2-XTEN with enhanced pharmacokinetic properties wherein the GLP2-XTEN is a sequence that has at least about 80% sequence identity, or alternatively 81%, 82%, 83%, 84%, 85%, 86%, 87%, 88%, 89%, 90%, 91%, 92%, 93%, 94%, 95%, 96%, 97%, 98%, 99%, or 100% sequence identity compared to a sequence selected from any one of Tables 13, 32 or 33. In other embodiments, the GLP2-XTEN with enhanced pharmacokinetic properties comprises a GLP-2 sequence that has at least about 80% sequence identity, or alternatively 81%, 82%, 83%, 84%, 85%, 86%, 87%, 88%, 89%, 90%, 91%, 92%, 93%, 94%, 95%, 96%, 97%, 98%, or about 99% sequence identity compared to a sequence from Table 1 linked to one or more XTEN that has at least about 80% sequence identity, or alternatively 81%, 82%, 83%, 84%, 85%, 86%, 87%, 88%, 89%, 90%, 91%, 92%, 93%, 94%, 95%, 96%, 97%, 98%, or about 99% sequence identity compared to a sequence from Table 4. For the subject compositions, GLP2-XTEN with a longer terminal half-life is generally preferred, so as to improve patient convenience, to increase the interval between doses and to reduce the amount of drug required to achieve a sustained effect. In the embodiments hereinabove described in this paragraph the administration of the fusion protein results in an improvement in at least one, two, three or more of the parameters disclosed herein as being useful for assessing the subject conditions; e.g., maintaining a blood concentration, maintaining bowel function, preventing onset of a symptom associated with a gastrointestinal condition such as colitis, short bowel syndrome or Crohn's Disease, using a lower dose of fusion protein compared to the corresponding GLP-2 component not linked to the fusion protein and administered at a comparable dose or dose regimen to a subject. Alternatively, in the embodiments hereinabove described in this paragraph the administration of the fusion protein results in an improvement in at least one of the parameters disclosed herein as being useful for assessing the subject conditions using a comparable dose of fusion protein but administered using a dose regimen that has a 2-fold, or 3-fold, or 4-fold, or 5-fold, or 6-fold, or 7-fold, or 8-fold, or 10-fold, or 20-fold greater interval between dose administrations compared to the corresponding GLP-2 component not linked to the fusion protein and administered to the subject. In the foregoing embodiments, the total dose in millimoles/kg administered to achieve the improvement in the parameter(s) is at least about three-fold lower, or at least about four-fold, or at least about five-fold, or at least about six-fold, or at least about eight-fold, or at least about 10-fold lower compared to the corresponding GLP-2 component not linked to the XTEN.

[0229] As described more fully in the Examples pertaining to pharmacokinetic characteristics of fusion proteins comprising XTEN, it was observed that increasing the length of the XTEN sequence confers a disproportionate increase in the terminal half-life of a fusion protein comprising the XTEN. Accordingly, the invention provides GLP2-XTEN fusion proteins comprising XTEN wherein the XTEN is selected to provide a targeted half-life for the GLP2-XTEN composition administered to a subject. In some embodiments, the invention provides monomeric GLP2-XTEN fusion proteins comprising XTEN wherein the XTEN is selected to confer an increase in the terminal half-life for the GLP2-XTEN administered to a subject, compared to the corresponding GLP-2 not linked to the XTEN and administered at a comparable dose, wherein the increase is at least about two-fold longer, or at least about three-fold, or at least about four-fold, or at least about five-fold, or at least about six-fold, or at least about seven-fold, or at least about eight-fold, or at least about nine-fold, or at least about ten-fold, or at least about 15-fold, or at least a 20-fold, or at least a 40-fold or greater an increase in terminal half-life compared to the GLP-2 not linked to the XTEN. In another embodiment, the administration of a therapeutically effective amount of GLP2-XTEN to a subject in need thereof results in a terminal half-life that is at least 12 h greater, or at least about 24 h greater, or at least about 48 h greater, or at least about 72 h greater, or at least about 96 h greater, or at least about 144 h greater, or at least about 7 days greater, or at least about 14 days greater, or at least about 21 days greater compared to a comparable dose of the corresponding GLP-2 not linked to the XTEN. In another embodiment, administration of a therapeutically effective dose of a GLP2-XTEN fusion protein to a subject in need thereof can result in a gain in time between consecutive doses necessary to maintain a therapeutically effective blood level of the fusion protein of at least 48 h, or at least 72 h, or at least about 96 h, or at least about 120 h, or at least about 7 days, or at least about 14 days, or at least about 21 days between consecutive doses compared to the corresponding GLP-2 not linked to the XTEN and administered at a comparable dose. It will be understood in the art that the time between consecutive doses to maintain a “therapeutically effective blood level” will vary greatly depending on the physiologic state of the subject, and it will be appreciated that a patient with Crohn's Disease may require more frequent and longer dosing of a GLP-2 preparation compared to a patient receiving the same preparation for short bowel syndrome. The foregoing notwithstanding, it is believed that the GLP2-XTEN of the present invention permit less frequent dosing, as described above, compared to a GLP-2 not linked to the XTEN. In one embodiment, the GLP2-XTEN administered using a therapeutically-effective amount to a subject results in blood concentrations of the GLP2-XTEN fusion protein that remains above at least 500 ng/ml, or at least about 1000 ng/ml, or at least about 2000 ng/ml, or at least about 3000 ng/ml, or at least about 4000 ng/ml, or at least about 5000 ng/ml, or at least about 10000 ng/ml, or at least about 15000 ng/ml, or at least about 20000 ng/ml, or at least about 30000 ng/ml, or at least about 40000 ng/ml for at least about 24 hours, or at least about 48 hours, or at least about 72 hours, or at least about 96 hours, or at least about 120 hours, or at least about 144 hours.

[0230] In one embodiment, the present invention provides GLP2-XTEN fusion proteins that exhibits an increase in AUC of at least about 50%, or at least about 60%, or at least about 70%, or at least about 80%, or at least about 90%, or at least about a 100%, or at least about 150%, or at least about 200%, or at least about 300%, or at least about 500%, or at least about 1000%, or at least about a 2000% compared to the corresponding GLP-2 not linked to the XTEN and administered to a subject at a comparable dose. In another embodiment, the GLP2-XTEN administered at an appropriate dose to a subject results in area under the curve concentrations of the GLP2-XTEN fusion protein of at least 100000 hr*ng/mL, or at least about 200000 hr*ng/mL, or at least about 400000 hr*ng/mL, or at least about 600000 hr*ng/mL, or at least about 800000 hr*ng/mL, or at least about 1000000 hr*ng/mL, or at least about 2000000 hr*ng/mL after a single dose. The pharmacokinetic parameters of a GLP2-XTEN can be determined by standard methods involving dosing, the taking of blood samples at times intervals, and the assaying of the protein using ELISA, HPLC, radioassay, or other methods known in the art or as described herein, followed by standard calculations of the data to derive the half-life and other PK parameters.

[0231] The enhanced PK parameters allow for reduced dosing of the GLP2-XTEN compositions, compared to GLP-2 not linked to the XTEN, particularly for those subjects receiving doses for routine prophylaxis or chronic treatment of a gastrointestinal condition. In one embodiment, a smaller moles-equivalent amount of about two-fold less, or about three-fold less, or about four-fold less, or about five-fold less, or about six-fold less, or about eight-fold less, or about 10-fold less or greater of the fusion protein is administered in comparison to the corresponding GLP-2 not linked to the XTEN under a dose regimen needed to maintain a comparable area under the curve as the corresponding amount of the GLP-2 not linked to the XTEN. In another embodiment, a smaller amount of moles of about two-fold less, or about three-fold less, or about four-fold less, or about five-fold less, or about six-fold less, or about eight-fold less, or about 10-fold less or greater of the fusion protein is administered in comparison to the corresponding GLP-2 not linked to the XTEN under a dose regimen needed to maintain a blood concentration above at least about 500 ng/ml, at least about 1000 ng/ml, or at least about 2000 ng/ml, or at least about 3000 ng/ml, or at least about 4000 ng/ml, or at least about 5000 ng/ml, or at least about 10000 ng/ml, or at least about 15000 ng/ml, or at least about 20000 ng/ml, or at least about 30000 ng/ml, or at least about 40000 ng/ml for at least about 24 hours, or at least about 48 h, or at least 72 h, or at least 96 h, or at least 120 h compared to the corresponding amount of the GLP-2 not linked to the XTEN. In another embodiment, the GLP2-XTEN fusion protein requires less frequent administration for treatment of a subject with gastrointestinal condition, wherein the dose is administered about every four days, about every seven days, about every 10 days, about every 14 days, about every 21 days, or about monthly of the fusion protein administered to a subject, and the fusion protein achieves a comparable area under the curve as the corresponding GLP-2 not linked to the XTEN. In yet other embodiments, an accumulatively smaller amount of moles of about 5%, or about 10%, or about 20%, or about 40%, or about 50%, or about 60%, or about 70%, or about 80%, or about 90% less of the fusion protein is administered to a subject in comparison to the corresponding amount of the GLP-2 not linked to the XTEN under a dose regimen needed to achieve the therapeutic outcome or clinical parameter, yet the fusion protein achieves at least a comparable area under the curve as the corresponding GLP-2 not linked to the XTEN. The accumulative smaller amount is measure for a period of at least about one week, or about 14 days, or about 21 days, or about one month.

[0232] (b) Pharmacology and Pharmaceutical Properties of GLP2-XTEN

[0233] The present invention provides GLP2-XTEN compositions comprising GLP-2 covalently linked to the XTEN that can have enhanced properties compared to GLP-2 not linked to XTEN, as well as methods to enhance the therapeutic and/or biologic activity or effect of the respective two GLP-2 components of the compositions. In addition, GLP2-XTEN fusion proteins provide significant advantages over chemical conjugates, such as pegylated constructs of GLP-2, notably the fact that recombinant GLP2-XTEN fusion proteins can be made in host cell expression systems, which can reduce time and cost at both the research and development and manufacturing stages of a product, as well as result in a more homogeneous, defined product with less toxicity for both the product and metabolites of the GLP2-XTEN compared to pegylated conjugates.

[0234] As therapeutic agents, the GLP2-XTEN possesses a number of advantages over therapeutics not comprising XTEN, including one or more of the following non-limiting enhanced properties: increased solubility, increased thermal stability, reduced immunogenicity, increased apparent molecular weight, reduced renal clearance, reduced proteolysis, reduced metabolism, enhanced therapeutic efficiency, a lower effective therapeutic dose, increased bioavailability, increased time between dosages capable of maintaining a subject without increased symptoms of colitis, enteritis, or Crohn's Disease, the ability to administer the GLP2-XTEN composition intravenously, subcutaneously, or intramuscularly, a “tailored” rate of absorption when administered intravenously, subcutaneously, or intramuscularly, enhanced lyophilization stability, enhanced serum/plasma stability, increased terminal half-life, increased solubility in blood stream, decreased binding by neutralizing antibodies, decreased active clearance, reduced side effects, reduced immunogenicity, retention of substrate binding affinity, stability to degradation, stability to freeze-thaw, stability to proteases, stability to ubiquitination, ease of administration, compatibility with other pharmaceutical excipients or carriers, persistence in the subject, increased stability in storage (e.g., increased shelf-life), reduced toxicity in an organism or environment and the like. The GLP2-XTEN fusion proteins of the embodiments disclosed herein exhibit one or more or any combination of the improved properties and/or the embodiments as detailed herein. The net effect of the enhanced properties is that the use of a GLP2-XTEN composition can result in enhanced therapeutic and/or biologic effect compared to a GLP-2 not linked to the XTEN, result in economic benefits associated with less frequent dosing, or result in improved patient compliance when administered to a subject with a GLP-2-related condition.

[0235] In one embodiment, XTEN as a fusion partner increases the solubility of the GLP-2 payload. Accordingly, where enhancement of the pharmaceutical or physicochemical properties of the GLP-2 is desirable, such as the degree of aqueous solubility or stability, the length and/or the motif family composition of the XTEN sequences incorporated into the fusion protein may each be selected to confer a different degree of solubility and/or stability on the respective fusion proteins such that the overall pharmaceutical properties of the GLP2-XTEN composition are enhanced. The GLP2-XTEN fusion proteins can be constructed and assayed, using methods described herein, to confirm the physicochemical properties and the XTEN adjusted, as needed, to result in the desired properties. In one embodiment, the GLP2-XTEN has an aqueous solubility that is at least about 25% greater compared to a GLP-2 not linked to the fusion protein, or at least about 30%, or at least about 40%, or at least about 50%, or at least about 75%, or at least about 100%, or at least about 200%, or at least about 300%, or at least about 400%, or at least about 500%, or at least about 1000% greater than the corresponding GLP-2 not linked to the fusion protein.

[0236] The invention provides methods to produce and recover expressed GLP2-XTEN from a host cell with enhanced solubility and ease of recovery compared to GLP-2 not linked to the XTEN. In one embodiment, the method includes the steps of transforming a host cell with a polynucleotide encoding a GLP2-XTEN with one or more XTEN components of cumulative sequence length greater than about 100, or greater than about 200, or greater than about 400, or greater than about 800 amino acid residues, expressing the GLP2-XTEN fusion protein in the host cell, and recovering the expressed fusion protein in soluble form. In the foregoing embodiment, the XTEN of the GLP2-XTEN fusion proteins can have at least about 80% sequence identity, or about 90%, or about 91%, or about 92%, or about 93%, or about 94%, or about 95%, or about 96%, or about 97%, or about 98%, or about 99%, to about 100% sequence identity compared to one or more XTEN selected from Table 4, and the GLP-2 can have at least about 80% sequence identity, or about 90%, or about 91%, or about 92%, or about 93%, or about 94%, or about 95%, or about 96%, or about 97%, or about 98%, or about 99%, or 100% sequence identity compared to a GLP-2 selected from Table 1 and the GLP2-XTEN components can be in an N- to C-terminus configuration selected from any one of formulae I-VI.

[0237] The invention provides methods to produce the GLP2-XTEN compositions that can maintain the GLP-2 component at therapeutic levels when administered to a subject in need thereof for at least a two-fold, or at least a three-fold, or at least a four-fold, or at least a five-fold greater period of time compared to comparable dosages of the corresponding GLP-2 not linked to the XTEN. It will be understood in the art that a “comparable dosage” of GLP2-XTEN fusion protein would represent a greater weight of agent but would have the same approximate moles of GLP-2 in the dose of the fusion protein and/or would have the same approximate nmol/kg concentration relative to the dose of GLP-2 not linked to the XTEN. The method to produce the compositions that can maintain the GLP-2 component at therapeutic levels includes the steps of selecting the XTEN appropriate for conjugation to a GLP-2 to provide the desired pharmacokinetic properties in view of a given dose and dose regimen, creating an expression construct that encodes the GLP2-XTEN using a configuration described herein, transforming an appropriate host cell with an expression vector comprising the encoding gene, expressing and recovering the GLP2-XTEN, administration of the GLP2-XTEN to a subject followed by assays to verify the pharmacokinetic properties, the activity of the GLP2-XTEN fusion protein (e.g., the ability to bind receptor), and the safety of the administered composition. The subject can be selected from mouse, rat, monkey and human By the methods, GLP2-XTEN provided herein can result in increased efficacy of the administered composition by maintaining the circulating concentrations of the GLP-2 at therapeutic levels for an enhanced period of time.

[0238] In another aspect, the GLP2-XTEN compositions of the invention are capable of resulting in an intestinotrophic effect. As used herein, “intestinotrophic effect” means that a subject, e.g., mouse, rat, monkey or human, exhibits at least one of the following after administration of a GLP-2 containing composition: intestinal growth, increased hyperplasia of the villus epithelium, increased crypt cell proliferation, increased the height of the crypt and villus axis, increased healing after intestinal anastomosis, increased small bowel weight, increased small bowel length, decreased small bowel epithelium apoptosis, or enhancement of intestinal function. The GLP2-XTEN compositions may act in an endocrine fashion to link intestinal growth and metabolism with nutrient intake. GLP-2 and related analogs may be treatments for short bowel syndrome, Crohn's disease, osteoporosis and as adjuvant therapy during cancer chemotherapy, amongst other gastrointestinal conditions described herein. In one embodiment, a GLP2-XTEN is capable of resulting in at least one, or two, or three or more intestinotrophic effects when administered to a subject using an effective amount.

[0239] The characteristics of GLP2-XTEN compositions of the invention, including functional characteristics or biologic and pharmacologic activity and parameters that result, can be determined by any suitable screening assay known in the art for measuring the desired characteristic. The invention provides methods to assay the GLP2-XTEN fusion proteins of differing composition or configuration in order to provide GLP2-XTEN with the desired degree of biologic and/or therapeutic activity, as well as safety profile. Specific in vitro, in vivo and ex vivo biological assays are used to assess the activity of each configured GLP2-XTEN and/or GLP-2 component to be incorporated into GLP2-XTEN, including but not limited to the assays of the Examples, assays of Table 32, determination of inflammatory cytokine levels, GLP-2 blood concentrations, ELISA assays, or bowel function tests, as well as clinical endpoints such as bleeding, inflammation, colitis, diarrhea, fecal wet weight, weight loss, sodium loss, intestinal ulcers, intestinal obstruction, fistulae, and abscesses, survival, among others known in the art. The foregoing assays or endpoints can also be used in preclinical assays to assess GLP-2 sequence variants (assayed as single components or as GLP2-XTEN fusion proteins) and can be compared to the native human GLP-2 to determine whether they have the same degree of biologic activity as the native GLP-2, or some fraction thereof such that they are suitable for inclusion in GLP2-XTEN. In one embodiment, the invention provides GLP2-XTEN fusion proteins that exhibit at least about 30%, or at least about 40%, or at least about 50%, or at least about 60%, or at least about 70%, or at least about 80%, or at least about 90%, or at least about 100% or at least about 120% or at least about 150% or at least about 200% of the intestinotrophic effect compared to the corresponding GLP-2 not linked to XTEN and administered to a subject using a comparable dose.

[0240] Dose optimization is important for all drugs. A therapeutically effective dose or amount of the GLP2-XTEN varies according to factors such as the disease state, age, sex, and weight of the individual, and the ability of the administered fusion protein to elicit a desired response in the individual. For example, a standardized single dose of GLP-2 for all patients presenting with diverse pulmonary conditions or abnormal clinical parameters (e.g., neutralizing antibodies) may not always be effective. A consideration of these factors is well within the purview of the ordinarily skilled clinician for the purpose of determining the therapeutically or pharmacologically effective amount of the GLP2-XTEN and the appropriated dosing schedule, versus that amount that would result in insufficient potency such that clinical improvement is not achieved.

[0241] The methods of the invention includes administration of consecutive doses of a therapeutically effective amount of the GLP2-XTEN for a period of time sufficient to achieve and/or maintain the desired parameter or clinical effect, and such consecutive doses of a therapeutically effective amount establishes the therapeutically effective dose regimen for the GLP2-XTEN, i.e., the schedule for consecutively administered doses of the fusion protein composition, wherein the doses are given in amounts to result in a sustained beneficial effect on any clinical sign or symptom, aspect, measured parameter or characteristic of a GLP-2-related disease state or condition, including, but not limited to, those described herein. A prophylactically effective amount refers to an amount of GLP2-XTEN required for the period of time necessary to prevent a physiologic or clinical result or event; e.g., reduced mesenteric blood flow, bleeding, inflammation, colitis, diarrhea, fecal wet weight, weight loss, sodium loss, intestinal ulcers, intestinal obstruction, fistulae, and abscesses, changed frequency in bowel movements, uveitis, as well growth failure in children, or maintaining blood concentrations of GLP-2 above a threshold level, e.g., 100 ng/ml of GLP-2 equivalent (or approximately 2200 ng/ml of GLP-2-2G_XTEN_AE864) or 30 pmol/L. In the methods of treatment, the dosage amount of the GLP2-XTEN that is administered to a subject ranges from about 0.2 to 500 mg/kg/dose (2.5 nmol/kg-6250 nmol/kg), or from about 2 to 300 mg/kg/dose (25 nmol/kg-3750 nmol/kg), or from about 6 to about 100 mg/kg/dose (75 nmol/kg/dose-1250 nmol/kg/dose), or from about 10 to about 60 mg/kg/dose (125 nmol/kg/dose-750 nmol/kg/dose) for a subject. A suitable dosage may also depend on other factors that may influence the response to the drug; e.g., subjects with surgically resected bowel generally requiring higher doses compared to irritable bowel syndrome. In some embodiments, the method comprises administering a therapeutically-effective amount of a pharmaceutical composition comprising a GLP2-XTEN fusion protein composition comprising GLP-2 linked to one or more XTEN sequences and at least one pharmaceutically acceptable carrier to a subject in need thereof that results in a greater improvement in at least one of the disclosed parameters or physiologic conditions, or results in a more favorable clinical outcome compared to the effect on the parameter, condition or clinical outcome mediated by administration of a pharmaceutical composition comprising a GLP-2 not linked to XTEN and administered at a comparable dose. In one embodiment of the foregoing, the improvement is achieved by administration of the GLP2-XTEN pharmaceutical composition at a therapeutically effective dose. In another embodiment of the foregoing, the improvement is achieved by administration of multiple consecutive doses of the GLP2-XTEN pharmaceutical composition using a therapeutically effective dose regimen (as defined herein) for the length of the dosing period.

[0242] In many cases, the therapeutic levels for GLP-2 in subjects of different ages or degree of disease have been established and are available in published literature or are stated on the drug label for approved products containing the GLP-2. In other cases, the therapeutic levels can be established for new compositions, including those GLP2-XTEN fusion proteins of the disclosure. The methods for establishing the therapeutic levels and dosing schedules for a given composition are known to those of skill in the art (see, e.g., Goodman & Gilman's The Pharmacological Basis of Therapeutics, 11^{th} Edition, McGraw-Hill (2005)). For example, by using dose-escalation studies in subjects with the target disease or condition to determine efficacy or a desirable pharmacologic effect, appearance of adverse events, and determination of circulating blood levels, the therapeutic blood levels for a given subject or population of subjects can be determined for a given drug or biologic. The dose escalation studies can evaluate the activity of a GLP2-XTEN through metabolic studies in a subject or group of subjects that monitor physiological or biochemical parameters, as known in the art or as described herein for one or more parameters associated with the GLP-2-related condition, or clinical parameters associated with a beneficial outcome for the particular indication, together with observations and/or measured parameters to determine the no effect dose, adverse events, minimum effective dose and the like, together with measurement of pharmacokinetic parameters that establish the determined or derived circulating blood levels. The results can then be correlated with the dose administered and the blood concentrations of the therapeutic that are coincident with the foregoing determined parameters or effect levels. By these methods, a range of doses and blood concentrations can be correlated to the minimum effective dose as well as the maximum dose and blood concentration at which a desired effect occurs and the period for which it can be maintained, thereby establishing the therapeutic blood levels and dosing schedule for the composition. Thus, by the foregoing methods, a Cₘᵢₙ blood level is established, below which the GLP2-XTEN fusion protein would not have the desired pharmacologic effect and a Cₘₐₓ blood level, above which side effects may occur.

[0243] One of skill in the art can, by the means disclosed herein or by other methods known in the art, confirm that the administered GLP2-XTEN remains at therapeutic blood levels yet retains adequate safety (thereby establishing the “therapeutic window”) to maintain biological activity for the desired interval or requires adjustment in dose or length or sequence of XTEN. Further, the determination of the appropriate dose and dose frequency to keep the GLP2-XTEN within the therapeutic window establishes the therapeutically effective dose regimen; the schedule for administration of multiple consecutive doses using a therapeutically effective dose of the fusion protein to a subject in need thereof resulting in consecutive Cₘₐₓ peaks and/or Cₘᵢₙ troughs that remain above therapeutically-effective concentrations and result in an improvement in at least one measured parameter relevant for the target condition. In one embodiment, the GLP2-XTEN administered at an appropriate dose to a subject results in blood concentrations of the GLP2-XTEN fusion protein that remains above the minimum effective concentration to maintain a given activity or effect (as determined by the assays of the Examples or Table 32) for a period at least about two-fold longer compared to the corresponding GLP-2 not linked to XTEN and administered at a comparable dose; alternatively at least about three-fold longer; alternatively at least about four-fold longer; alternatively at least about five-fold longer; alternatively at least about six-fold longer; alternatively at least about seven-fold longer; alternatively at least about eight-fold longer; alternatively at least about nine-fold longer, alternatively at least about ten-fold longer, or at least about twenty-fold longer or greater compared to the corresponding GLP-2 not linked to XTEN and administered at a comparable dose. As used herein, an “appropriate dose” means a dose of a drug or biologic that, when administered to a subject, would result in a desirable therapeutic or pharmacologic effect and/or a blood concentration within the therapeutic window. For example, serum or plasma levels of GLP-2 or XTEN-containing fusion proteins comprising GLP-2 can be measured by nephelometry, ELISA, HPLC, radioimmunoassay or by immunoelectrophoresis (Jeppesen P B. Impaired meal stimulated glucagon-like peptide 2 response in ileal resected short bowel patients with intestinal failure. Gut. (1999) 45(4):559-963; assays of Examples 18-21). Phenotypic identification of GLP-2 or GLP-2 variants can be accomplished by a number of methods including isoelectric focusing (IEF) (Jeppsson et al., Proc. Natl. Acad. Sci. USA, 81:5690-93, 1994), or by DNA analysis (Kidd et al., Nature, 304:230-34, 1983; Braun et al., Eur. J. Clin. Chem. Clin. Biochem., 34:761-64, 1996).

[0244] In one embodiment, administration of at least two doses, or at least three doses, or at least four or more doses of a GLP2-XTEN using a therapeutically effective dose regimen results in a gain in time of at least about three-fold longer; alternatively at least about four-fold longer; alternatively at least about five-fold longer; alternatively at least about six-fold longer; alternatively at least about seven-fold longer; alternatively at least about eight-fold longer; alternatively at least about nine-fold longer or at least about ten-fold longer between at least two consecutive _{Cmax} peaks and/or _{Cmin} troughs for blood levels of the fusion protein compared to the corresponding biologically active protein of the fusion protein not linked to the XTEN and administered at a comparable dose regimen to a subject. In another embodiment, the GLP2-XTEN administered at a therapeutically effective dose regimen results in a comparable improvement in one, or two, or three or more measured parameters using less frequent dosing or a lower total dosage in moles of the fusion protein of the pharmaceutical composition compared to the corresponding biologically active protein component(s) not linked to the XTEN and administered to a subject using a therapeutically effective dose regimen for the GLP-2. The measured parameters include any of the clinical, biochemical, or physiological parameters disclosed herein, or others known in the art for assessing subjects with GLP-2-related condition. Non-limiting examples of parameters or physiologic effects that can be assayed to assess the activity of the GLP2-XTEN fusion proteins include assays of the Example, Table 32 or tests or assays to detect reduced mesenteric blood flow, bleeding, inflammation, colitis, diarrhea, fecal wet weight, sodium loss, weight loss, intestinal ulcers, intestinal obstruction, fistulae, and abscesses, changed frequency in bowel movements, uveitis, growth failure in children, or maintaining blood concentrations of GLP-2 above a threshold level, e.g., 100 ng/ml of GLP-2 equivalent (or approximately 2200 ng/ml of GLP-2-2G_XTEN_AE864), as well as parameters obtained from experimental animal models of enteritis such as body weight gain, small intestine length, reduction in TNFα content of the small intestine, reduced mucosal atrophy, reduced incidence of perforated ulcers, and height of villi.

[0245] In some embodiments, the biological activity of the GLP-2 component is manifested by the intact GLP2-XTEN fusion protein, while in other cases the biological activity of the GLP-2 component is primarily manifested upon cleavage and release of the GLP-2 from the fusion protein by action of a protease that acts on a cleavage sequence incorporated into the GLP2-XTEN fusion protein using configurations and sequences described herein. In the foregoing, the GLP2-XTEN is designed to reduce the binding affinity of the GLP-2 component for the GLP-2 receptor when linked to the XTEN but have restored or increased affinity when released from XTEN through the cleavage of cleavage sequence(s) incorporated into the GLP2-XTEN sequence. In one embodiment of the foregoing, the invention provides an isolated fusion protein comprising a GLP-2 linked to at least a first XTEN by a cleavage sequence, wherein the fusion protein has less than 10% or the biological activity (e.g., receptor binding) prior to cleavage and wherein the GLP-2 released from the fusion protein by proteolytic cleavage at the cleavage sequence has biological activity that is at least about 40%, at least about 50%, at least about 60%, or at least about 70%, or at least about 80%, or at least about 90%, or at least about 95% as active compared to native GLP-2 not linked to the XTEN.

[0246] In one aspect, the invention provides GLP2-XTEN compositions designed to reduce active clearance of the fusion protein, thereby increasing the terminal half-life of GLP2-XTEN administered to a subject, while still retaining biological activity. Without being bound by any particular theory, it is believed that the GLP2-XTEN of the present invention have comparatively higher and/or sustained activity achieved by reduced active clearance of the molecule by the addition of unstructured XTEN to the GLP-2. Uptake, elimination, and inactivation of GLP-2 can occur in the circulatory system as well as in the extravascular space.

### VI). Uses of the Glp2-Xten Compositions

[0247] In another aspect, the invention provides GLP2-XTEN fusion proteins for use in methods of treatment, including treatment for achieving a beneficial effect in a gastrointestinal condition mediated or ameliorated by GLP-2. As used herein, “gastrointestinal condition” is intended to include, but is not limited to gastritis, digestion disorders, malabsorption syndrome, short-gut syndrome, short bowel syndrome, cul-de-sac syndrome, inflammatory bowel disease, celiac disease, tropical sprue, hypogammaglobulinemic sprue, Crohn's disease, ulcerative colitis, enteritis, chemotherapy-induced enteritis, irritable bowel syndrome, small intestine damage, small intestinal damage due to cancer-chemotherapy, gastrointestinal injury, diarrheal diseases, intestinal insufficiency, acid-induced intestinal injury, arginine deficiency, idiopathic hypospermia, obesity, catabolic illness, febrile neutropenia, obesity, steatorrhea, autoimmune diseases, gastrointestinal barrier disorders, sepsis, bacterial peritonitis, burn-induced intestinal damage, decreased gastrointestinal motility, intestinal failure, chemotherapy-associated bacteremia, bowel trauma, bowel ischemia, mesenteric ischemia, malnutrition, necrotizing enterocolitis, necrotizing pancreatitis, neonatal feeding intolerance, NSAID-induced gastrointestinal damage, nutritional insufficiency, total parenteral nutrition damage to gastrointestinal tract, neonatal nutritional insufficiency, radiation-induced enteritis, radiation-induced injury to the intestines, mucositis, pouchitis, and gastrointestinal-induced ischemia.

[0248] The present invention provides GLP2-XTEN fusion proteins for use in methods for treating a subject, such as a human, with a GLP-2-related disease, disorder or gastrointestinal condition in order to achieve a beneficial effect, addressing disadvantages and/or limitations of other methods of treatment using GLP-2 preparations that have a relatively short terminal half-life, require repeated administrations, or have unfavorable pharmacoeconomics. The fact that GLP-2 native, recombinant or synthetic proteins have a short half-life necessitates frequent dosing in order to achieve clinical benefit, which results in difficulties in the management of such patients.

[0249] In one embodiment, the method of treatment comprises administering a therapeutically-effective amount of a GLP2-XTEN composition to a subject with a gastrointestinal condition. In another embodiment of the method of treatment, the administration of the GLP2-XTEN composition results in the improvement of one, two, three or more biochemical, physiological or clinical parameters associated with the gastrointestinal condition. In the foregoing method, the administered GLP2-XTEN comprises a GLP-2 with at least about 80%, or at least about 90%, or at least about 95%, or at least about 97%, or at least about 99% sequence identity to a GLP-2 of Table 1 linked to at least a first XTEN with at least about 80%, or at least about 90%, or at least about 95%, or at least about 97%, or at least about 99% sequence identity to a XTEN selected from any one of Tables 4, and 8-12. In another embodiment of the foregoing method, the administered GLP2-XTEN has a sequence with at least about 80%, or at least about 90%, or at least about 95%, or at least about 97%, or at least about 99% sequence identity to a sequence from Tables 13, 32, or 33. In one embodiment, the method of treatment comprises administering a therapeutically-effective amount of a GLP2-XTEN composition in one or more doses to a subject with a gastrointestinal condition wherein the administration results in the improvement of one, two, three or more biochemical, physiological or clinical parameters or a therapeutic effect associated with the condition for a period at least two-fold longer, or at least four-fold longer, or at least five-fold longer, or at least six-fold longer compared to a GLP-2 not linked to the XTEN and administered using a comparable amount. In another embodiment, the method of treatment comprises administering a therapeutically-effective amount of a GLP2-XTEN composition to a subject suffering from GLP-2 deficiency wherein the administration results in preventing onset of a clinically relevant parameter or symptom or dropping below a clinically-relevant blood concentration for a duration at least two-fold, or at least three-fold, or at least four-fold longer compared to a GLP-2 not linked to the XTEN. In another embodiment, the method of treatment comprises administering a therapeutically-effective amount of a GLP2-XTEN to a subject with a gastrointestinal condition, wherein the administration results in at least a 5%, or 10%, or 20%, or 30%, or 40%, or 50%, or 60%, or 70%, or 80%, or 90% greater improvement of at least one, two, or three parameters associated with the gastrointestinal condition compared to the GLP-2 not linked to XTEN and administered using a comparable nmol/kg amount. In the foregoing embodiments of the method of treatment, the administration is subcutaneous, intramuscular, or intravenous. In the foregoing embodiments of the method of treatment, the subject is selected from the group consisting of mouse, rat, monkey, and human. In the foregoing embodiments of the method of treatment, the therapeutic effect or parameter includes, but is not limited to, blood concentrations of GLP-2, increased mesenteric blood flow, decreased inflammation, increased weight gain, decreased diarrhea, decreased fecal wet weight, intestinal wound healing, increase in plasma citrulline concentrations, decreased CRP levels, decreased requirement for steroid therapy, enhancing or stimulating mucosal integrity, decreased sodium loss, minimizing, mitigating, or preventing bacterial translocation in the intestines, enhancing, stimulating or accelerating recovery of the intestines after surgery; preventing relapses of inflammatory bowel disease; or achieving or maintaining energy homeostasis, among others.

[0250] In one embodiment, the method of treatment is used to treat a subject with small intestinal damage due to chemotherapeutic agents such as, but not limited to 5-FU, altretamine, bleomycin, busulfan, capecitabine, carboplatin, carmustine, chlorambucil, cisplatin, cladribine, crisantaspase, cyclophosphamide, cytarabine, dacarbazine, dactinomycin, daunorubicin, docetaxel, doxorubicin, epirubicin, etoposide, fludarabine, fluorouracil, gemcitabine, hydroxycarbamide, idarubicin, ifosfamide, irinotecan, liposomal doxorubicin, leucovorin, lomustine, melphalan, mercaptopurine, mesna, methotrexate, mitomycin, mitoxantrone, oxaliplatin, paclitaxel, pemetrexed, pentostatin, procarbazine, raltitrexed, streptozocin, tegafur-uracil, temozolomide, thiotepa, tioguanine, thioguanine, topotecan, treosulfan, vinblastine, vincristine, vindesine, and vinorelbine.

[0251] Prior to administering treatment by the described methods, a diagnosis of a gastrointestinal condition may be obtained. A gastrointestinal condition can be diagnosed by standard of care means known in the art. Ulcers, for example, may be diagnosed by barium x-ray of the esophagus, stomach, and intestine, by endoscopy, or by blood, breath, and stomach tissue biopsy (e.g., to detect the presence of Helicobacter pylori). Malabsorption syndromes can be diagnosed by blood tests or stool tests that monitor nutrient levels in the blood or levels of fat in stool that are diagnostic of a malabsorption syndrome. Celiac sprue can be diagnosed by antibody tests which may include testing for antiendomysial antibody (IgA), antitransglutaminase (IgA), antigliadin (IgA and IgG), and total serum IgA. Endoscopy or small bowel biopsy can be used to detect abnormal intestinal lining where symptoms such as flattening of the villi, which are diagnostic of celiac sprue. Tropical sprue can be diagnosed by detecting malabsorption or infection using small bowel biopsy or response to chemotherapy. Inflammatory bowel disease can be detected by colonoscopy or by an x-ray following a barium enema in combination with clinical symptoms, where inflammation, bleeding, or ulcers on the colon wall are diagnostic of inflammatory bowel diseases such as ulcerative colitis or Crohn's disease.

[0252] In some embodiments of the method of treatment, administration of the GLP2-XTEN to a subject results in an improvement in one or more of the biochemical, physiologic, or clinical parameters that is of greater magnitude than that of the corresponding GLP-2 component not linked to the XTEN, determined using the same assay or based on a measured clinical parameter. In one embodiment of the foregoing, the administration of a therapeutically effective amount of a GLP2-XTEN composition to a subject in need thereof results in a greater reduction of parenteral nutrition (PN) dependence in patients with adult short bowel syndrome (SBS) of about 10%, or about 20%, or about 30%, or about 40%, or about 50%, or about 60%, or about 70%, or more in the subject at 2-7 days after administration compared to a comparable amount of the corresponding GLP-2 not linked to the XTEN. In another embodiment, the administration of a GLP2-XTEN to a subject in need thereof using a therapeutically effective dose regimen results in an increase of body weight of 10%, or about 20%, or about 30%, or about 40%, or about 50% or more in the subject at 7, 10, 14, 21 or 30 days after initiation of administration compared to a comparable therapeutically effective dose regimen of the corresponding GLP-2 not linked to the XTEN. In another embodiment, the administration of a therapeutically effective amount of a GLP2-XTEN composition to a subject in need thereof results in a greater reduction in fecal wet weight in patients with adult short bowel syndrome (SBS) of about 10%, or about 20%, or about 30%, or about 40%, or about 50%, or about 60%, or about 70%, or more in the subject at 2-7 days after administration compared to a comparable amount of the corresponding GLP-2 not linked to the XTEN. In another embodiment, the administration of a therapeutically effective amount of a GLP2-XTEN composition to a subject in need thereof results in a greater reduction in sodium loss in patients with adult short bowel syndrome (SBS) of about 10%, or about 20%, or about 30%, or about 40%, or about 50%, or about 60%, or about 70%, or more in the subject at 2-7 days after administration compared to a comparable amount of the corresponding GLP-2 not linked to the XTEN.

[0253] In some embodiments of the method of treatment, (i) a smaller amount of moles of about two-fold less, or about three-fold less, or about four-fold less, or about five-fold less, or about six-fold less, or about eight-fold less, or about 10-fold less of the GLP2-XTEN fusion protein is administered to a subject in need thereof in comparison to the corresponding GLP-2 not linked to the XTEN under an otherwise same dose regimen, and the fusion protein achieves a comparable area under the curve and/or a comparable therapeutic effect as the corresponding GLP-2 not linked to the XTEN; (ii) the GLP2-XTEN fusion protein is administered less frequently (e.g., every three days, about every seven days, about every 10 days, about every 14 days, about every 21 days, or about monthly) in comparison to the corresponding GLP-2 not linked to the XTEN under an otherwise same dose amount, and the fusion protein achieves a comparable area under the curve and/or a comparable therapeutic effect as the corresponding GLP-2 not linked to the XTEN; or (iii) an accumulative smaller amount of moles of at least about 20%, or about 30%, or about 40%, or about 50%, or about 60%, or about 70%, or about 80%, or about 90% less of the fusion protein is administered in comparison to the corresponding GLP-2 not linked to the XTEN under an otherwise same dose regimen and the GLP2-XTEN fusion protein achieves a comparable area under the curve and/or a comparable therapeutic effect as the corresponding GLP-2 not linked to the XTEN. The accumulative smaller amount is measured for a period of at least about one week, or about 14 days, or about 21 days, or about one month. In the foregoing embodiments of the method of treatment, the therapeutic effect can be determined by any of the measured parameters described herein, including but not limited to blood concentrations of GLP-2, assays of Table 32, or assays to detect reduced mesenteric blood flow, bleeding, inflammation, colitis, diarrhea, fecal wet weight, weight loss, sodium loss, intestinal ulcers, intestinal obstruction, fistulae, and abscesses, changed frequency in bowel movements, uveitis, growth failure in children, or maintaining blood concentrations of GLP-2 above a threshold level, e.g., 100 ng/ml of GLP-2 equivalent (or approximately 2200 ng/ml of GLP-2-2G_XTEN_AE864), among others known in the art for GLP-2-related conditions.

[0254] The invention provides GLP2-XTEN fusion proteins for use in a pharmaceutical regimen for treating a subject with a gastrointestinal condition. In one embodiment, the regimen comprises a pharmaceutical composition comprising a GLP2-XTEN fusion protein described herein. In another embodiment, the pharmaceutical regimen further comprises the step of determining the amount of pharmaceutical composition needed to achieve a therapeutic effect in the subject. In another embodiment, the pharmaceutical regimen for treating a subject with a gastrointestinal condition comprises administering the pharmaceutical composition in two or more successive doses to the subject at an effective amount, wherein the administration results in at least a 5%, or 10%, or 20%, or 30%, or 40%, or 50%, or 60%, or 70%, or 80%, or 90% greater improvement of at least one, two, or three parameters associated with the gastrointestinal condition compared to the GLP-2 not linked to XTEN and administered using a comparable nmol/kg amount. In another embodiment of the pharmaceutical regiment, the effective amount is at least about 5, or least about 10, or least about 25, or least about 100, or least about 200 nmoles/kg, or any amount intermediate to the foregoing. In another embodiment, the pharmaceutical regimen for treating a subject with a gastrointestinal condition comprises administering a therapeutically effective amount of the pharmaceutical composition once about every 3, 6, 7, 10, 14, 21, 28 or more days. In another embodiment, the pharmaceutical regimen for treating a subject with a gastrointestinal condition comprises administering the GLP2-XTEN pharmaceutical composition wherein said administration is subcutaneous, intramuscular, or intravenous. In another embodiment, the pharmaceutical regimen for treating a subject with a gastrointestinal condition comprises administering a therapeutically effective amount of the pharmaceutical composition, wherein the therapeutically effective amount results in maintaining blood concentrations of the fusion protein within a therapeutic window for the fusion protein at least three-fold longer compared to the corresponding GLP-2 not linked to the XTEN administered at a comparable amount to the subject.

[0255] The invention further contemplates that the GLP2-XTEN used in accordance with the methods provided herein can be administered in conjunction with other treatment methods and compositions (e.g., anti-inflammatory agents such as steroids or NSAIDS) useful for treating GLP-2-related conditions, or conditions for which GLP-2 is or could be adjunctive therapy.

[0256] In another aspect, the invention provides GLP2-XTEN fusion proteins for use in a method of preparing a medicament for treatment of a GLP-2-related condition. In one embodiment, the method of preparing a medicament comprises linking a GLP-2 sequence with at least about 80%, or at least about 90%, or at least about 95%, or at least about 97%, or at least about 99% sequence identity to a GLP-2 of Table 1 to at least a first XTEN with at least about 80%, or at least about 90%, or at least about 95%, or at least about 97%, or at least about 99% sequence identity to a XTEN selected from any one of Tables 4, and 8-12, wherein the GLP2-XTEN retains at least a portion of the biological activity of the native GLP-2, and further combining the GLP2-XTEN with at least one pharmaceutically acceptable carrier. In another embodiment, the GLP2-XTEN has a sequence with at least about 80%, or at least about 90%, or at least about 95%, or at least about 97%, or at least about 99% sequence identity compared to a sequence selected from any one of Tables 13, 32 or 33.

[0257] In another aspect, the invention provides a method of designing the GLP2-XTEN compositions to achieve desired pharmacokinetic, pharmacologic or pharmaceutical properties. In general, the steps in the design and production of the fusion proteins and the inventive compositions, as illustrated in FIGS. 4-6, include: (1) selecting a GLP-2 (e.g., native proteins, sequences of Table 1, analogs or derivatives with activity) to treat the particular condition; (2) selecting the XTEN that will confer the desired PK and physicochemical characteristics on the resulting GLP2-XTEN (e.g., the administration of the GLP2-XTEN composition to a subject results in the fusion protein being maintained within the therapeutic window for a greater period compared to GLP-2 not linked to the XTEN); (3) establishing a desired N- to C-terminus configuration of the GLP2-XTEN to achieve the desired efficacy or PK parameters; (4) establishing the design of the expression vector encoding the configured GLP2-XTEN; (5) transforming a suitable host with the expression vector; and (6) expressing and recovering of the resultant fusion protein. For those GLP2-XTEN for which an increase in half-life or an increased period of time spent above the minimum effective concentration is desired, the XTEN chosen for incorporation generally has at least about 288, or about 432, or about 576, or about 864, or about 875, or about 912, or about 923 amino acid residues where a single XTEN is to be incorporated into the GLP2-XTEN. In another embodiment, the GLP2-XTEN comprises a first XTEN of the foregoing lengths, and at least a second XTEN of about 36, or about 72, or about 144, or about 288, or about 576, or about 864, or about 875, or about 912, or about 923, or about 1000 or more amino acid residues.

[0258] In another aspect, the invention provides methods of making GLP2-XTEN compositions to improve ease of manufacture, result in increased stability, increased water solubility, and/or ease of formulation, as compared to the native GLP-2. In one embodiment, the invention includes a method of increasing the water solubility of a GLP-2 comprising the step of linking the GLP-2 to one or more XTEN such that a higher concentration in soluble form of the resulting GLP2-XTEN can be achieved, under physiologic conditions, compared to the GLP-2 in an un-fused state. In some embodiments, the method results in a GLP2-XTEN fusion protein wherein the water solubility is at least about 20%, or at least about 30% greater, or at least about 50% greater, or at least about 75% greater, or at least about 90% greater, or at least about 100% greater, or at least about 150% greater, or at least about 200% greater, or at least about 400% greater, or at least about 600% greater, or at least about 800% greater, or at least about 1000% greater, or at least about 2000% greater under physiologic conditions, compared to the un-fused GLP-2. Factors that contribute to the property of XTEN to confer increased water solubility of GLP-2 when incorporated into a fusion protein include the high solubility of the XTEN fusion partner and the low degree of self-aggregation between molecules of XTEN in solution. In one embodiment of the foregoing, the GLP2-XTEN comprises a GLP-2 linked to an XTEN having at least about 36, or about 48, or about 96, or about 144, or about 288, or about 576, or about 864 amino acid residues in which the solubility of the fusion protein under physiologic conditions is at least three-fold greater than the corresponding GLP-2 not linked to the XTEN, or alternatively, at least four-fold, or five-fold, or six-fold, or seven-fold, or eight-fold, or nine-fold, or at least 10-fold, or at least 20-fold, or at least 30-fold, or at least 50-fold, or at least 60-fold or greater than GLP-2 not linked to the XTEN. In one embodiment of the foregoing, the GLP-2 has at least about 80%, or at least about 90%, or at least about 95%, or at least about 97%, or at least about 99% sequence identity to a GLP-2 of Table 1 linked to at least an XTEN with at least about 80%, or at least about 90%, or at least about 95%, or at least about 97%, or at least about 99% sequence identity to a XTEN selected from any one of Tables 4, and 8-12.

[0259] In another embodiment, the invention includes a method of increasing the shelf-life of a GLP-2 comprising the step of linking the GLP-2 with one or more XTEN selected such that the shelf-life of the resulting GLP2-XTEN is extended compared to the GLP-2 in an un-fused state. As used herein, shelf-life refers to the period of time over which the functional activity of a GLP-2 or GLP2-XTEN that is in solution or in some other storage formulation remains stable without undue loss of activity. As used herein, “functional activity” refers to a pharmacologic effect or biological activity, such as the ability to bind a receptor or ligand, or substrate, or trigger an up-regulated activity, or to display one or more known functional activities associated with a GLP-2, as known in the art. A GLP-2 that degrades or aggregates generally has reduced functional activity or reduced bioavailability compared to one that remains in solution. Factors that contribute to the ability of the method to extend the shelf life of GLP-2s when incorporated into a fusion protein include increased water solubility, reduced self-aggregation in solution, and increased heat stability of the XTEN fusion partner. In particular, the low tendency of XTEN to aggregate facilitates methods of formulating pharmaceutical preparations containing higher drug concentrations of GLP-2s, and the heat-stability of XTEN contributes to the property of GLP2-XTEN fusion proteins to remain soluble and functionally active for extended periods. In one embodiment, the method results in GLP2-XTEN fusion proteins with “prolonged” or “extended” shelf-life that exhibit greater activity relative to a standard that has been subjected to the same storage and handling conditions. The standard may be the un-fused full-length GLP-2. In one embodiment, the method includes the step of formulating the isolated GLP2-XTEN with one or more pharmaceutically acceptable excipients that enhance the ability of the XTEN to retain its unstructured conformation and for the GLP2-XTEN to remain soluble in the formulation for a time that is greater than that of the corresponding un-fused GLP-2. In one embodiment, the method comprises linking a GLP-2 to one or more XTEN selected from Table 4 to create a GLP2-XTEN fusion protein results in a solution that retains greater than about 100% of the functional activity, or greater than about 105%, 110%, 120%, 130%, 150% or 200% of the functional activity of a standard when compared at a given time point and when subjected to the same storage and handling conditions as the standard, thereby increasing its shelf-life.

[0260] Shelf-life may also be assessed in terms of functional activity remaining after storage, normalized to functional activity when storage began. GLP2-XTEN fusion proteins of the invention with prolonged or extended shelf-life as exhibited by prolonged or extended functional activity retain about 50% more functional activity, or about 60%, 70%, 80%, or 90% more of the functional activity of the equivalent GLP-2 not linked to the XTEN when subjected to the same conditions for the same period of time. For example, a GLP2-XTEN fusion protein of the invention comprising GLP-2 fused to one or more XTEN sequences selected from Table 4 retains about 80% or more of its original activity in solution for periods of up to 2 weeks, or 4 weeks, or 6 weeks, or 12 weeks or longer under various elevated temperature conditions. In some embodiments, the GLP2-XTEN retains at least about 50%, or about 60%, or at least about 70%, or at least about 80%, and most preferably at least about 90% or more of its original activity in solution when heated at 80° C. for 10 min. In other embodiments, the GLP2-XTEN retains at least about 50%, preferably at least about 60%, or at least about 70%, or at least about 80%, or alternatively at least about 90% or more of its original activity in solution when heated or maintained at 37° C. for about 7 days. In another embodiment, GLP2-XTEN fusion protein retains at least about 80% or more of its functional activity after exposure to a temperature of about 30° C. to about 70° C. over a period of time of about one hour to about 18 hours. In the foregoing embodiments hereinabove described in this paragraph, the retained activity of the GLP2-XTEN is at least about two-fold, or at least about three-fold, or at least about four-fold, or at least about five-fold, or at least about six-fold greater at a given time point than that of the corresponding GLP-2 not linked to the XTEN.

### VII). The Nucleic Acids Sequences of the Invention

[0261] The present invention provides isolated polynucleic acids encoding GLP2-XTEN chimeric fusion proteins and sequences complementary to polynucleic acid molecules encoding GLP2-XTEN chimeric fusion proteins, including homologous variants thereof. In another aspect, the invention encompasses methods to produce polynucleic acids encoding GLP2-XTEN chimeric fusion proteins and sequences complementary to polynucleic acid molecules encoding GLP2-XTEN chimeric fusion protein, including homologous variants thereof. In general, and as illustrated in FIGS. 4-6, the methods of producing a polynucleotide sequence coding for a GLP2-XTEN fusion protein and expressing the resulting gene product include assembling nucleotides encoding GLP-2 and XTEN, ligating the components in frame, incorporating the encoding gene into an expression vector appropriate for a host cell, transforming the appropriate host cell with the expression vector, and culturing the host cell under conditions causing or permitting the fusion protein to be expressed in the transformed host cell, thereby producing the biologically-active GLP2-XTEN polypeptide, which is recovered as an isolated fusion protein by standard protein purification methods known in the art. Standard recombinant techniques in molecular biology are used to make the polynucleotides and expression vectors of the present invention.

[0262] In accordance with the invention, nucleic acid sequences that encode GLP2-XTEN (or its complement) are used to generate recombinant DNA molecules that direct the expression of GLP2-XTEN fusion proteins in appropriate host cells. Several cloning strategies are suitable for performing the present invention, many of which is used to generate a construct that comprises a gene coding for a fusion protein of the GLP2-XTEN composition of the present invention, or its complement. In some embodiments, the cloning strategy is used to create a gene that encodes a monomeric GLP2-XTEN that comprises at least a first GLP-2 and at least a first XTEN polypeptide, or their complement. In one embodiment of the foregoing, the gene comprises a sequence encoding a GLP-2 or sequence variant. In other embodiments, the cloning strategy is used to create a gene that encodes a monomeric GLP2-XTEN that comprises nucleotides encoding at least a first molecule of GLP-2 or its complement and a first and at least a second XTEN or their complement that is used to transform a host cell for expression of the fusion protein of the GLP2-XTEN composition. In the foregoing embodiments hereinabove described in this paragraph, the genes can further comprise nucleotides encoding spacer sequences that also encode cleavage sequence(s).

[0263] In designing a desired XTEN sequences, it was discovered that the non-repetitive nature of the XTEN of the inventive compositions is achieved despite use of a “building block” molecular approach in the creation of the XTEN-encoding sequences. This was achieved by the use of a library of polynucleotides encoding peptide sequence motifs, described above, that are then ligated and/or multimerized to create the genes encoding the XTEN sequences (see FIGS. 4, 5, 8, 9 and Examples). Thus, while the XTEN(s) of the expressed fusion protein may consist of multiple units of as few as four different sequence motifs, because the motifs themselves consist of non-repetitive amino acid sequences, the overall XTEN sequence is rendered non-repetitive. Accordingly, in one embodiment, the XTEN-encoding polynucleotides comprise multiple polynucleotides that encode non-repetitive sequences, or motifs, operably linked in frame and in which the resulting expressed XTEN amino acid sequences are non-repetitive.

[0264] In one approach, a construct is first prepared containing the DNA sequence corresponding to GLP2-XTEN fusion protein. In those embodiments in which a mammalian native GLP-2 sequence is to be employed in the fusion protein, DNA encoding the GLP-2 of the compositions is obtained from a cDNA library prepared using standard methods from tissue or isolated cells believed to possess GLP-2 mRNA and to express it at a detectable level. Libraries are screened with probes containing, for example, about 20 to 100 bases designed to identify the GLP-2 gene of interest by hybridization using conventional molecular biology techniques. The best candidates for probes are those that represent sequences that are highly homologous for GLP-2, and should be of sufficient length and sufficiently unambiguous that false positives are minimized, but may be degenerate at one or more positions. If necessary, the coding sequence can be obtained using conventional primer extension procedures as described in Sambrook, et al., supra, to detect precursors and processing intermediates of mRNA that may not have been reverse-transcribed into cDNA. One can then use polymerase chain reaction (PCR) methodology to amplify the target DNA or RNA coding sequence to obtain sufficient material for the preparation of the GLP2-XTEN constructs containing the GLP-2 gene. Assays can then be conducted to confirm that the hybridizing full-length genes are the desired GLP-2 gene(s). By these conventional methods, DNA can be conveniently obtained from a cDNA library prepared from such sources. In those embodiments in which a GLP-2 analog (with one or more amino acid substitutions, such as sequences of Table 1) for the preparation of the GLP2-XTEN constructs, the GLP-2 encoding gene(s) is created by standard synthetic procedures known in the art (e.g., automated nucleic acid synthesis using, for example one of the methods described in Engels et al. (Agnew. Chem. Int. Ed. Engl., 28:716-734 1989)), using DNA sequences obtained from publicly available databases, patents, or literature references. Such procedures are well known in the art and well described in the scientific and patent literature. For example, sequences can be obtained from Chemical Abstracts Services (CAS) Registry Numbers (published by the American Chemical Society) and/or GenBank Accession Numbers (e.g., Locus ID, NP_XXXXX, and XP_XXXXX) Model Protein identifiers available through the National Center for Biotechnology Information (NCBI) webpage, available on the world wide web at ncbi.nlm.nih.gov that correspond to entries in the CAS Registry or GenBank database that contain an amino acid sequence of the protein of interest or of a fragment or variant of the protein. For such sequence identifiers provided herein, the summary pages associated with each of these CAS and GenBank and GenSeq Accession Numbers as well as the cited journal publications (e.g., PubMed ID number (PMID)) are each incorporated by reference in their entireties, particularly with respect to the amino acid sequences described therein. In one embodiment, the GLP-2 encoding gene encodes a protein from any one of Table 1, or a fragment or variant thereof.

[0265] A gene or polynucleotide encoding the GLP-2 portion of the subject GLP2-XTEN protein, in the case of an expressed fusion protein that comprises a single GLP-2 is then be cloned into a construct, which is a plasmid or other vector under the control of appropriate transcription and translation sequences for high level protein expression in a biological system. In a later step, a second gene or polynucleotide coding for the XTEN is genetically fused to the nucleotides encoding the N- and/or C-terminus of the GLP-2 gene by cloning it into the construct adjacent and in frame with the gene(s) coding for the GLP-2. This second step occurs through a ligation or multimerization step. In the foregoing embodiments hereinabove described in this paragraph, it is to be understood that the gene constructs that are created can alternatively be the complement of the respective genes that encode the respective fusion proteins.

[0266] The gene encoding for the XTEN can be made in one or more steps, either fully synthetically or by synthesis combined with enzymatic processes, such as restriction enzyme-mediated cloning, PCR and overlap extension, including methods more fully described in the Examples. The methods disclosed herein can be used, for example, to ligate short sequences of polynucleotides encoding XTEN into longer XTEN genes of a desired length and sequence. In one embodiment, the method ligates two or more codon-optimized oligonucleotides encoding XTEN motif or segment sequences of about 9 to 14 amino acids, or about 12 to 20 amino acids, or about 18 to 36 amino acids, or about 48 to about 144 amino acids, or about 144 to about 288 or longer, or any combination of the foregoing ranges of motif or segment lengths.

[0267] Alternatively, the disclosed method is used to multimerize XTEN-encoding sequences into longer sequences of a desired length; e.g., a gene encoding 36 amino acids of XTEN can be dimerized into a gene encoding 72 amino acids, then 144, then 288, etc. Even with multimerization, XTEN polypeptides can be constructed such that the XTEN-encoding gene has low or virtually no repetitiveness through design of the codons selected for the motifs of the shortest unit being used, which can reduce recombination and increase stability of the encoding gene in the transformed host.

[0268] Genes encoding XTEN with non-repetitive sequences are assembled from oligonucleotides using standard techniques of gene synthesis. The gene design can be performed using algorithms that optimize codon usage and amino acid composition. In one method of the invention, a library of relatively short XTEN-encoding polynucleotide constructs is created and then assembled, as described above. The resulting genes are then assembled with genes encoding GLP-2 or regions of GLP-2, as illustrated in FIGS. 5 and 8, and the resulting genes used to transform a host cell and produce and recover the GLP2-XTEN for evaluation of its properties, as described herein.

[0269] In some embodiments, the GLP2-XTEN sequence is designed for optimized expression by inclusion of an N-terminal sequence (NTS) XTEN, rather than using a leader sequence known in the art. In one embodiment, the NTS is created by inclusion of encoding nucleotides in the XTEN gene determined to result in optimized expression when joined to the gene encoding the fusion protein. In one embodiment, the N-terminal XTEN sequence of the expressed GLP2-XTEN is optimized for expression in a eukaryotic cell, such as but not limited to CHO, HEK, yeast, and other cell types know in the art.

[0270] Polynucleotide Libraries

[0271] In another aspect, the invention provides libraries of polynucleotides that encode XTEN sequences that are used to assemble genes that encode XTEN of a desired length and sequence.

[0272] In certain embodiments, the XTEN-encoding library constructs comprise polynucleotides that encode polypeptide segments of a fixed length. As an initial step, a library of oligonucleotides that encode motifs of 9-14 amino acid residues can be assembled. In a preferred embodiment, libraries of oligonucleotides that encode motifs of 12 amino acids are assembled.

[0273] The XTEN-encoding sequence segments can be dimerized or multimerized into longer encoding sequences. Dimerization or multimerization can be performed by ligation, overlap extension, PCR assembly or similar cloning techniques known in the art. This process of can be repeated multiple times until the resulting XTEN-encoding sequences have reached the organization of sequence and desired length, providing the XTEN-encoding genes. As will be appreciated, a library of polynucleotides that encodes, e.g., 12 amino acid motifs can be dimerized and/or ligated into a library of polynucleotides that encode 36 amino acids. Libraries encoding motifs of different lengths; e.g., 9-14 amino acid motifs leading to libraries encoding 27 to 42 amino acids are contemplated by the invention. In turn, the library of polynucleotides that encode 27 to 42 amino acids, and preferably 36 amino acids (as described in the Examples) can be serially dimerized into a library containing successively longer lengths of polynucleotides that encode XTEN sequences of a desired length for incorporation into the gene encoding the GLP2-XTEN fusion protein, as disclosed herein.

[0274] A more efficient way to optimize the DNA sequence encoding XTEN is based on combinatorial libraries. The gene encoding XTEN can be designed and synthesized in segment such that multiple codon versions are obtained for each segment. These segments can be randomly assembled into a library of genes such that each library member encodes the same amino acid sequences but library members comprise a large number of codon versions. Such libraries can be screened for genes that result in high-level expression and/or a low abundance of truncation products. The process of combinatorial gene assembly is illustrated in FIG. 10. The genes in FIG. 10 are assembled from 6 base fragments and each fragment is available in 4 different codon versions. This allows for a theoretical diversity of 4096.

[0275] In some embodiments, libraries are assembled of polynucleotides that encode amino acids that are limited to specific sequence XTEN families; e.g., AD, AE, AF, AG, AM, or AQ sequences of Table 3. In other embodiments, libraries comprise sequences that encode two or more of the motif family sequences from Table 3. The names and sequences of representative, non-limiting polynucleotide sequences of libraries that encode 36mers are presented in Tables 8-11, and the methods used to create them are described more fully in the respective Examples. In other embodiments, libraries that encode XTEN are constructed from segments of polynucleotide codons linked in a randomized sequence that encode amino acids wherein at least about 80%, or at least about 90%, or at least about 91%, or at least about 92%, or at least about 93%, or at least about 94%, or at least about 95%, or at least about 97%, or at least about 98%, or at least about 99% of the codons are selected from the group consisting of condons for glycine (G), alanine (A), serine (S), threonine (T), glutamate (E) and proline (P) amino acids. The libraries can be used, in turn, for serial dimerization or ligation to achieve polynucleotide sequence libraries that encode XTEN sequences, for example, of 48, 72, 144, 288, 576, 864, 875, 912, 923, 1318 amino acids, or up to a total length of about 3000 amino acids, as well as intermediate lengths, in which the encoded XTEN can have one or more of the properties disclosed herein, when expressed as a component of a GLP2-XTEN fusion protein. In some cases, the polynucleotide library sequences may also include additional bases used as “sequencing islands,” described more fully below.

[0276] FIG. 5 is a schematic flowchart of representative, non-limiting steps in the assembly of an XTEN polynucleotide construct and a GLP2-XTEN polynucleotide construct in the embodiments of the invention. Individual oligonucleotides 501 are annealed into sequence motifs 502 such as a 12 amino acid motif (“12-mer”), which is ligated to additional sequence motifs from a library to create a pool that encompasses the desired length of the XTEN 504, as well as ligated to a smaller concentration of an oligo containing BbsI, and KpnI restriction sites 503. The resulting pool of ligation products is gel-purified and the band with the desired length of XTEN is cut, resulting in an isolated XTEN gene with a stopper sequence 505. The XTEN gene is cloned into a stuffer vector. In this case, the vector encodes an optional CBD sequence 506 and a GFP gene 508. Digestion is than performed with BbsI/HindIII to remove 507 and 508 and place the stop codon. The resulting product is then cloned into a BsaI/HindIII digested vector containing a gene encoding the GLP-2, resulting in the gene 500 encoding a GLP2-XTEN fusion protein. A non-exhaustive list of the polynucleotides encoding XTEN and precursor sequences is provided in Tables 7-12.

TABLE 7
DNA sequences of XTEN and precursor sequences

| XTEN | | SEQ ID |
|---|---|---|
| Name | DNA Nucleotide Sequence | NO: |
| AE48 | ATGGCTGAACCTGCTGGCTCTCCAACCTCCACTGAGGAAGGTACCCCGGGTAG | 210 |
| | CGGTACTGCTTCTTCCTCTCCAGGTAGCTCTACCCCTTCTGGTGCAACCGGCTC | |
| | TCCAGGTGCTTCTCCGGGCACCAGCTCTACCGGTTCT | |
| AM48 | ATGGCTGAACCTGCTGGCTCTCCAACCTCCACTGAGGAAGGTGCATCCCCGGG | 211 |
| | CACCAGCTCTACCGGTTCTCCAGGTAGCTCTACCCCGTCTGGTGCTACCGGCT | |
| | CTCCAGGTAGCTCTACCCCGTCTGGTGCTACTGGCTCT | |
| AE144 | GGTAGCGAACCGGCAACTTCCGGCTCTGAAACCCCAGGTACTTCTGAAAGCG | 212 |
| | CTACTCCTGAGTCTGGCCCAGGTAGCGAACCTGCTACCTCTGGCTCTGAAACC | |
| | CCAGGTAGCCCGGCAGGCTCTCCGACTTCCACCGAGGAAGGTACCTCTACTGA | |
| | ACCTTCTGAGGGTAGCGCTCCAGGTAGCGAACCGGCAACCTCTGGCTCTGAA | |
| | ACCCCAGGTAGCGAACCTGCTACCTCCGGCTCTGAAACTCCAGGTAGCGAAC | |
| | CGGCTACTTCCGGTTCTGAAACTCCAGGTACCTCTACCGAACCTTCCGAAGGC | |
| | AGCGCACCAGGTACTTCTGAAAGCGCAACCCCTGAATCCGGTCCAGGTAGCG | |
| | AACCGGCTACTTCTGGCTCTGAGACTCCAGGTACTTCTACCGAACCGTCCGAA | |
| | GGTAGCGCACCA | |
| AF144 | GGTACTTCTACTCCGGAAAGCGGTTCCGCATCTCCAGGTACTTCTCCTAGCGG | 213 |
| | TGAATCTTCTACTGCTCCAGGTACCTCTCCTAGCGGCGAATCTTCTACTGCTCC | |
| | AGGTTCTACCAGCTCTACCGCTGAATCTCCTGGCCCAGGTTCTACCAGCGAAT | |
| | CCCCGTCTGGCACCGCACCAGGTTCTACTAGCTCTACCGCAGAATCTCCGGGT | |
| | CCAGGTACTTCCCCTAGCGGTGAATCTTCTACTGCTCCAGGTACCTCTACTCCG | |
| | GAAAGCGGCTCCGCATCTCCAGGTTCTACTAGCTCTACTGCTGAATCTCCTGG | |
| | TCCAGGTACCTCCCCTAGCGGCGAATCTTCTACTGCTCCAGGTACCTCTCCTA | |
| | GCGGCGAATCTTCTACCGCTCCAGGTACCTCCCCTAGCGGTGAATCTTCTACC | |
| | GCACCA | |
| AE288 | GGTACCTCTGAAAGCGCAACTCCTGAGTCTGGCCCAGGTAGCGAACCTGCTAC | 214 |
| | CTCCGGCTCTGAGACTCCAGGTACCTCTGAAAGCGCAACCCCGGAATCTGGTC | |
| | CAGGTAGCGAACCTGCAACCTCTGGCTCTGAAACCCCAGGTACCTCTGAAAG | |
| | CGCTACTCCTGAATCTGGCCCAGGTACTTCTACTGAACCGTCCGAGGGCAGCG | |
| | CACCAGGTAGCCCTGCTGGCTCTCCAACCTCCACCGAAGAAGGTACCTCTGAA | |
| | AGCGCAACCCCTGAATCCGGCCCAGGTAGCGAACCGGCAACCTCCGGTTCTG | |
| | AAACCCCAGGTACTTCTGAAAGCGCTACTCCTGAGTCCGGCCCAGGTAGCCCG | |
| | GCTGGCTCTCCGACTTCCACCGAGGAAGGTAGCCCGGCTGGCTCTCCAACTTC | |
| | TACTGAAGAAGGTACTTCTACCGAACCTTCCGAGGGCAGCGCACCAGGTACTT | |
| | CTGAAAGCGCTACCCCTGAGTCCGGCCCAGGTACTTCTGAAAGCGCTACTCCT | |
| | GAATCCGGTCCAGGTACTTCTGAAAGCGCTACCCCGGAATCTGGCCCAGGTA | |
| | GCGAACCGGCTACTTCTGGTTCTGAAACCCCAGGTAGCGAACCGGCTACCTCC | |
| | GGTTCTGAAACTCCAGGTAGCCCAGCAGGCTCTCCGACTTCCACTGAGGAAG | |
| | GTACTTCTACTGAACCTTCCGAAGGCAGCGCACCAGGTACCTCTACTGAACCT | |
| | TCTGAGGGCAGCGCTCCAGGTAGCGAACCTGCAACCTCTGGCTCTGAAACCCC | |
| | AGGTACCTCTGAAAGCGCTACTCCTGAATCTGGCCCAGGTACTTCTACTGAAC | |
| | CGTCCGAGGGCAGCGCACCA | |
| AE576 | GGTAGCCCGGCTGGCTCTCCTACCTCTACTGAGGAAGGTACTTCTGAAAGCGC | 215 |
| | TACTCCTGAGTCTGGTCCAGGTACCTCTACTGAACCGTCCGAAGGTAGCGCTC | |
| | CAGGTAGCCCAGCAGGCTCTCCGACTTCCACTGAGGAAGGTACTTCTACTGAA | |
| | CCTTCCGAAGGCAGCGCACCAGGTACCTCTACTGAACCTTCTGAGGGCAGCGC | |
| | TCCAGGTACTTCTGAAAGCGCTACCCCGGAATCTGGCCCAGGTAGCGAACCG | |
| | GCTACTTCTGGTTCTGAAACCCCAGGTAGCGAACCGGCTACCTCCGGTTCTGA | |
| | AACTCCAGGTAGCCCGGCAGGCTCTCCGACCTCTACTGAGGAAGGTACTTCTG | |
| | AAAGCGCAACCCCGGAGTCCGGCCCAGGTACCTCTACCGAACCGTCTGAGGG | |
| | CAGCGCACCAGGTACTTCTACCGAACCGTCCGAGGGTAGCGCACCAGGTAGC | |
| | CCAGCAGGTTCTCCTACCTCCACCGAGGAAGGTACTTCTACCGAACCGTCCGA | |
| | GGGTAGCGCACCAGGTACCTCTACTGAACCTTCTGAGGGCAGCGCTCCAGGT | |
| | ACTTCTGAAAGCGCTACCCCGGAGTCCGGTCCAGGTACTTCTACTGAACCGTC | |
| | CGAAGGTAGCGCACCAGGTACTTCTGAAAGCGCAACCCCTGAATCCGGTCCA | |
| | GGTAGCGAACCGGCTACTTCTGGCTCTGAGACTCCAGGTACTTCTACCGAACC | |
| | GTCCGAAGGTAGCGCACCAGGTACTTCTACTGAACCGTCTGAAGGTAGCGCA | |
| | CCAGGTACTTCTGAAAGCGCAACCCCGGAATCCGGCCCAGGTACCTCTGAAA | |
| | GCGCAACCCCGGAGTCCGGCCCAGGTAGCCCTGCTGGCTCTCCAACCTCCACC | |
| | GAAGAAGGTACCTCTGAAAGCGCAACCCCTGAATCCGGCCCAGGTAGCGAAC | |
| | CGGCAACCTCCGGTTCTGAAACCCCAGGTACCTCTGAAAGCGCTACTCCGGAG | |
| | TCTGGCCCAGGTACCTCTACTGAACCGTCTGAGGGTAGCGCTCCAGGTACTTC | |
| | TACTGAACCGTCCGAAGGTAGCGCACCAGGTACTTCTACCGAACCGTCCGAA | |
| | GGCAGCGCTCCAGGTACCTCTACTGAACCTTCCGAGGGCAGCGCTCCAGGTAC | |
| | CTCTACCGAACCTTCTGAAGGTAGCGCACCAGGTACTTCTACCGAACCGTCCG | |
| | AGGGTAGCGCACCAGGTAGCCCAGCAGGTTCTCCTACCTCCACCGAGGAAGG | |
| | TACTTCTACCGAACCGTCCGAGGGTAGCGCACCAGGTACCTCTGAAAGCGCA | |
| | ACTCCTGAGTCTGGCCCAGGTAGCGAACCTGCTACCTCCGGCTCTGAGACTCC | |
| | AGGTACCTCTGAAAGCGCAACCCCGGAATCTGGTCCAGGTAGCGAACCTGCA | |
| | ACCTCTGGCTCTGAAACCCCAGGTACCTCTGAAAGCGCTACTCCTGAATCTGG | |
| | CCCAGGTACTTCTACTGAACCGTCCGAGGGCAGCGCACCAGGTACTTCTGAAA | |
| | GCGCTACTCCTGAGTCCGGCCCAGGTAGCCCGGCTGGCTCTCCGACTTCCACC | |
| | GAGGAAGGTAGCCCGGCTGGCTCTCCAACTTCTACTGAAGAAGGTAGCCCGG | |
| | CAGGCTCTCCGACCTCTACTGAGGAAGGTACTTCTGAAAGCGCAACCCCGGA | |
| | GTCCGGCCCAGGTACCTCTACCGAACCGTCTGAGGGCAGCGCACCA | |
| AF576 | GGTTCTACTAGCTCTACCGCTGAATCTCCTGGCCCAGGTTCCACTAGCTCTACC | 216 |
| | GCAGAATCTCCGGGCCCAGGTTCTACTAGCGAATCCCCTTCTGGTACCGCTCC | |
| | AGGTTCTACTAGCTCTACCGCTGAATCTCCGGGTCCAGGTTCTACCAGCTCTA | |
| | CTGCAGAATCTCCTGGCCCAGGTACTTCTACTCCGGAAAGCGGTTCCGCTTCT | |
| | CCAGGTTCTACCAGCGAATCTCCTTCTGGCACCGCTCCAGGTACCTCTCCTAG | |
| | CGGCGAATCTTCTACCGCTCCAGGTTCTACTAGCGAATCTCCTTCTGGCACTG | |
| | CACCAGGTTCTACCAGCGAATCTCCTTCTGGCACCGCTCCAGGTACCTCTCCT | |
| | AGCGGCGAATCTTCTACCGCTCCAGGTTCTACTAGCGAATCTCCTTCTGGCAC | |
| | TGCACCAGGTTCTACCAGCGAATCTCCTTCTGGCACCGCTCCAGGTACCTCTC | |
| | CTAGCGGCGAATCTTCTACCGCTCCAGGTTCTACTAGCGAATCTCCTTCTGGC | |
| | ACTGCACCAGGTTCTACTAGCGAATCTCCTTCTGGCACTGCACCAGGTTCTAC | |
| | CAGCGAATCTCCGTCTGGCACTGCACCAGGTACCTCTACCCCTGAAAGCGGTT | |
| | CCGCTTCTCCAGGTTCTACTAGCGAATCTCCTTCTGGTACCGCTCCAGGTACTT | |
| | CTACCCCTGAAAGCGGCTCCGCTTCTCCAGGTTCCACTAGCTCTACCGCTGAA | |
| | TCTCCGGGTCCAGGTTCTACTAGCTCTACTGCAGAATCTCCTGGCCCAGGTAC | |
| | CTCTACTCCGGAAAGCGGCTCTGCATCTCCAGGTACTTCTACCCCTGAAAGCG | |
| | GTTCTGCATCTCCAGGTTCTACTAGCGAATCCCCGTCTGGTACCGCACCAGGT | |
| | ACTTCTACCCCGGAAAGCGGCTCTGCTTCTCCAGGTACTTCTACCCCGGAAAG | |
| | CGGCTCCGCATCTCCAGGTTCTACTAGCGAATCTCCTTCTGGTACCGCTCCAG | |
| | GTTCTACCAGCGAATCCCCGTCTGGTACTGCTCCAGGTTCTACCAGCGAATCT | |
| | CCTTCTGGTACTGCACCAGGTTCTACTAGCTCTACTGCAGAATCTCCTGGCCC | |
| | AGGTACCTCTACTCCGGAAAGCGGCTCTGCATCTCCAGGTACTTCTACCCCTG | |
| | AAAGCGGTTCTGCATCTCCAGGTTCTACTAGCGAATCTCCTTCTGGCACTGCA | |
| | CCAGGTTCTACCAGCGAATCTCCGTCTGGCACTGCACCAGGTACCTCTACCCC | |
| | TGAAAGCGGTTCCGCTTCTCCAGGTTCTACTAGCGAATCTCCTTCTGGCACTG | |
| | CACCAGGTTCTACCAGCGAATCTCCGTCTGGCACTGCACCAGGTACCTCTACC | |
| | CCTGAAAGCGGTTCCGCTTCTCCAGGTACTTCTCCGAGCGGTGAATCTTCTAC | |
| | CGCACCAGGTTCTACTAGCTCTACCGCTGAATCTCCGGGCCCAGGTACTTCTC | |
| | CGAGCGGTGAATCTTCTACTGCTCCAGGTTCCACTAGCTCTACTGCTGAATCT | |
| | CCTGGCCCAGGTACTTCTACTCCGGAAAGCGGTTCCGCTTCTCCAGGTTCTAC | |
| | TAGCGAATCTCCGTCTGGCACCGCACCAGGTTCTACTAGCTCTACTGCAGAAT | |
| | CTCCTGGCCCAGGTACCTCTACTCCGGAAAGCGGCTCTGCATCTCCAGGTACT | |
| | TCTACCCCTGAAAGCGGTTCTGCATCTCCA | |
| AE624 | ATGGCTGAACCTGCTGGCTCTCCAACCTCCACTGAGGAAGGTACCCCGGGTAG | 217 |
| | CGGTACTGCTTCTTCCTCTCCAGGTAGCTCTACCCCTTCTGGTGCAACCGGCTC | |
| | TCCAGGTGCTTCTCCGGGCACCAGCTCTACCGGTTCTCCAGGTAGCCCGGCTG | |
| | GCTCTCCTACCTCTACTGAGGAAGGTACTTCTGAAAGCGCTACTCCTGAGTCT | |
| | GGTCCAGGTACCTCTACTGAACCGTCCGAAGGTAGCGCTCCAGGTAGCCCAG | |
| | CAGGCTCTCCGACTTCCACTGAGGAAGGTACTTCTACTGAACCTTCCGAAGGC | |
| | AGCGCACCAGGTACCTCTACTGAACCTTCTGAGGGCAGCGCTCCAGGTACTTC | |
| | TGAAAGCGCTACCCCGGAATCTGGCCCAGGTAGCGAACCGGCTACTTCTGGTT | |
| | CTGAAACCCCAGGTAGCGAACCGGCTACCTCCGGTTCTGAAACTCCAGGTAG | |
| | CCCGGCAGGCTCTCCGACCTCTACTGAGGAAGGTACTTCTGAAAGCGCAACCC | |
| | CGGAGTCCGGCCCAGGTACCTCTACCGAACCGTCTGAGGGCAGCGCACCAGG | |
| | TACTTCTACCGAACCGTCCGAGGGTAGCGCACCAGGTAGCCCAGCAGGTTCTC | |
| | CTACCTCCACCGAGGAAGGTACTTCTACCGAACCGTCCGAGGGTAGCGCACC | |
| | AGGTACCTCTACTGAACCTTCTGAGGGCAGCGCTCCAGGTACTTCTGAAAGCG | |
| | CTACCCCGGAGTCCGGTCCAGGTACTTCTACTGAACCGTCCGAAGGTAGCGCA | |
| | CCAGGTACTTCTGAAAGCGCAACCCCTGAATCCGGTCCAGGTAGCGAACCGG | |
| | CTACTTCTGGCTCTGAGACTCCAGGTACTTCTACCGAACCGTCCGAAGGTAGC | |
| | GCACCAGGTACTTCTACTGAACCGTCTGAAGGTAGCGCACCAGGTACTTCTGA | |
| | AAGCGCAACCCCGGAATCCGGCCCAGGTACCTCTGAAAGCGCAACCCCGGAG | |
| | TCCGGCCCAGGTAGCCCTGCTGGCTCTCCAACCTCCACCGAAGAAGGTACCTC | |
| | TGAAAGCGCAACCCCTGAATCCGGCCCAGGTAGCGAACCGGCAACCTCCGGT | |
| | TCTGAAACCCCAGGTACCTCTGAAAGCGCTACTCCGGAGTCTGGCCCAGGTAC | |
| | CTCTACTGAACCGTCTGAGGGTAGCGCTCCAGGTACTTCTACTGAACCGTCCG | |
| | AAGGTAGCGCACCAGGTACTTCTACCGAACCGTCCGAAGGCAGCGCTCCAGG | |
| | TACCTCTACTGAACCTTCCGAGGGCAGCGCTCCAGGTACCTCTACCGAACCTT | |
| | CTGAAGGTAGCGCACCAGGTACTTCTACCGAACCGTCCGAGGGTAGCGCACC | |
| | AGGTAGCCCAGCAGGTTCTCCTACCTCCACCGAGGAAGGTACTTCTACCGAAC | |
| | CGTCCGAGGGTAGCGCACCAGGTACCTCTGAAAGCGCAACTCCTGAGTCTGG | |
| | CCCAGGTAGCGAACCTGCTACCTCCGGCTCTGAGACTCCAGGTACCTCTGAAA | |
| | GCGCAACCCCGGAATCTGGTCCAGGTAGCGAACCTGCAACCTCTGGCTCTGA | |
| | AACCCCAGGTACCTCTGAAAGCGCTACTCCTGAATCTGGCCCAGGTACTTCTA | |
| | CTGAACCGTCCGAGGGCAGCGCACCAGGTACTTCTGAAAGCGCTACTCCTGA | |
| | GTCCGGCCCAGGTAGCCCGGCTGGCTCTCCGACTTCCACCGAGGAAGGTAGC | |
| | CCGGCTGGCTCTCCAACTTCTACTGAAGAAGGTAGCCCGGCAGGCTCTCCGAC | |
| | CTCTACTGAGGAAGGTACTTCTGAAAGCGCAACCCCGGAGTCCGGCCCAGGT | |
| | ACCTCTACCGAACCGTCTGAGGGCAGCGCACCA | |
| AM875 | GGTACTTCTACTGAACCGTCTGAAGGCAGCGCACCAGGTAGCGAACCGGCTA | 218 |
| | CTTCCGGTTCTGAAACCCCAGGTAGCCCAGCAGGTTCTCCAACTTCTACTGAA | |
| | GAAGGTTCTACCAGCTCTACCGCAGAATCTCCTGGTCCAGGTACCTCTACTCC | |
| | GGAAAGCGGCTCTGCATCTCCAGGTTCTACTAGCGAATCTCCTTCTGGCACTG | |
| | CACCAGGTTCTACTAGCGAATCCCCGTCTGGTACTGCTCCAGGTACTTCTACT | |
| | CCTGAAAGCGGTTCCGCTTCTCCAGGTACCTCTACTCCGGAAAGCGGTTCTGC | |
| | ATCTCCAGGTAGCGAACCGGCAACCTCCGGCTCTGAAACCCCAGGTACCTCTG | |
| | AAAGCGCTACTCCTGAATCCGGCCCAGGTAGCCCGGCAGGTTCTCCGACTTCC | |
| | ACTGAGGAAGGTACCTCTACTGAACCTTCTGAGGGCAGCGCTCCAGGTACTTC | |
| | TGAAAGCGCTACCCCGGAGTCCGGTCCAGGTACTTCTACTGAACCGTCCGAAG | |
| | GTAGCGCACCAGGTACTTCTACCGAACCGTCCGAGGGTAGCGCACCAGGTAG | |
| | CCCAGCAGGTTCTCCTACCTCCACCGAGGAAGGTACTTCTACCGAACCGTCCG | |
| | AGGGTAGCGCACCAGGTACTTCTACCGAACCTTCCGAGGGCAGCGCACCAGG | |
| | TACTTCTGAAAGCGCTACCCCTGAGTCCGGCCCAGGTACTTCTGAAAGCGCTA | |
| | CTCCTGAATCCGGTCCAGGTACCTCTACTGAACCTTCCGAAGGCAGCGCTCCA | |
| | GGTACCTCTACCGAACCGTCCGAGGGCAGCGCACCAGGTACTTCTGAAAGCG | |
| | CAACCCCTGAATCCGGTCCAGGTACTTCTACTGAACCTTCCGAAGGTAGCGCT | |
| | CCAGGTAGCGAACCTGCTACTTCTGGTTCTGAAACCCCAGGTAGCCCGGCTGG | |
| | CTCTCCGACCTCCACCGAGGAAGGTAGCTCTACCCCGTCTGGTGCTACTGGTT | |
| | CTCCAGGTACTCCGGGCAGCGGTACTGCTTCTTCCTCTCCAGGTAGCTCTACC | |
| | CCTTCTGGTGCTACTGGCTCTCCAGGTACCTCTACCGAACCGTCCGAGGGTAG | |
| | CGCACCAGGTACCTCTACTGAACCGTCTGAGGGTAGCGCTCCAGGTAGCGAA | |
| | CCGGCAACCTCCGGTTCTGAAACTCCAGGTAGCCCTGCTGGCTCTCCGACTTC | |
| | TACTGAGGAAGGTAGCCCGGCTGGTTCTCCGACTTCTACTGAGGAAGGTACTT | |
| | CTACCGAACCTTCCGAAGGTAGCGCTCCAGGTGCAAGCGCAAGCGGCGCGCC | |
| | AAGCACGGGAGGTACTTCTGAAAGCGCTACTCCTGAGTCCGGCCCAGGTAGC | |
| | CCGGCTGGCTCTCCGACTTCCACCGAGGAAGGTAGCCCGGCTGGCTCTCCAAC | |
| | TTCTACTGAAGAAGGTTCTACCAGCTCTACCGCTGAATCTCCTGGCCCAGGTT | |
| | CTACTAGCGAATCTCCGTCTGGCACCGCACCAGGTACTTCCCCTAGCGGTGAA | |
| | TCTTCTACTGCACCAGGTACCCCTGGCAGCGGTACCGCTTCTTCCTCTCCAGGT | |
| | AGCTCTACCCCGTCTGGTGCTACTGGCTCTCCAGGTTCTAGCCCGTCTGCATCT | |
| | ACCGGTACCGGCCCAGGTAGCGAACCGGCAACCTCCGGCTCTGAAACTCCAG | |
| | GTACTTCTGAAAGCGCTACTCCGGAATCCGGCCCAGGTAGCGAACCGGCTACT | |
| | TCCGGCTCTGAAACCCCAGGTTCCACCAGCTCTACTGCAGAATCTCCGGGCCC | |
| | AGGTTCTACTAGCTCTACTGCAGAATCTCCGGGTCCAGGTACTTCTCCTAGCG | |
| | GCGAATCTTCTACCGCTCCAGGTAGCGAACCGGCAACCTCTGGCTCTGAAACT | |
| | CCAGGTAGCGAACCTGCAACCTCCGGCTCTGAAACCCCAGGTACTTCTACTGA | |
| | ACCTTCTGAGGGCAGCGCACCAGGTTCTACCAGCTCTACCGCAGAATCTCCTG | |
| | GTCCAGGTACCTCTACTCCGGAAAGCGGCTCTGCATCTCCAGGTTCTACTAGC | |
| | GAATCTCCTTCTGGCACTGCACCAGGTACTTCTACCGAACCGTCCGAAGGCAG | |
| | CGCTCCAGGTACCTCTACTGAACCTTCCGAGGGCAGCGCTCCAGGTACCTCTA | |
| | CCGAACCTTCTGAAGGTAGCGCACCAGGTAGCTCTACTCCGTCTGGTGCAACC | |
| | GGCTCCCCAGGTTCTAGCCCGTCTGCTTCCACTGGTACTGGCCCAGGTGCTTC | |
| | CCCGGGCACCAGCTCTACTGGTTCTCCAGGTAGCGAACCTGCTACCTCCGGTT | |
| | CTGAAACCCCAGGTACCTCTGAAAGCGCAACTCCGGAGTCTGGTCCAGGTAG | |
| | CCCTGCAGGTTCTCCTACCTCCACTGAGGAAGGTAGCTCTACTCCGTCTGGTG | |
| | CAACCGGCTCCCCAGGTTCTAGCCCGTCTGCTTCCACTGGTACTGGCCCAGGT | |
| | GCTTCCCCGGGCACCAGCTCTACTGGTTCTCCAGGTACCTCTGAAAGCGCTAC | |
| | TCCGGAGTCTGGCCCAGGTACCTCTACTGAACCGTCTGAGGGTAGCGCTCCAG | |
| | GTACTTCTACTGAACCGTCCGAAGGTAGCGCACCA | |
| AE864 | GGTAGCCCGGCTGGCTCTCCTACCTCTACTGAGGAAGGTACTTCTGAAAGCGC | 219 |
| | TACTCCTGAGTCTGGTCCAGGTACCTCTACTGAACCGTCCGAAGGTAGCGCTC | |
| | CAGGTAGCCCAGCAGGCTCTCCGACTTCCACTGAGGAAGGTACTTCTACTGAA | |
| | CCTTCCGAAGGCAGCGCACCAGGTACCTCTACTGAACCTTCTGAGGGCAGCGC | |
| | TCCAGGTACTTCTGAAAGCGCTACCCCGGAATCTGGCCCAGGTAGCGAACCG | |
| | GCTACTTCTGGTTCTGAAACCCCAGGTAGCGAACCGGCTACCTCCGGTTCTGA | |
| | AACTCCAGGTAGCCCGGCAGGCTCTCCGACCTCTACTGAGGAAGGTACTTCTG | |
| | AAAGCGCAACCCCGGAGTCCGGCCCAGGTACCTCTACCGAACCGTCTGAGGG | |
| | CAGCGCACCAGGTACTTCTACCGAACCGTCCGAGGGTAGCGCACCAGGTAGC | |
| | CCAGCAGGTTCTCCTACCTCCACCGAGGAAGGTACTTCTACCGAACCGTCCGA | |
| | GGGTAGCGCACCAGGTACCTCTACTGAACCTTCTGAGGGCAGCGCTCCAGGT | |
| | ACTTCTGAAAGCGCTACCCCGGAGTCCGGTCCAGGTACTTCTACTGAACCGTC | |
| | CGAAGGTAGCGCACCAGGTACTTCTGAAAGCGCAACCCCTGAATCCGGTCCA | |
| | GGTAGCGAACCGGCTACTTCTGGCTCTGAGACTCCAGGTACTTCTACCGAACC | |
| | GTCCGAAGGTAGCGCACCAGGTACTTCTACTGAACCGTCTGAAGGTAGCGCA | |
| | CCAGGTACTTCTGAAAGCGCAACCCCGGAATCCGGCCCAGGTACCTCTGAAA | |
| | GCGCAACCCCGGAGTCCGGCCCAGGTAGCCCTGCTGGCTCTCCAACCTCCACC | |
| | GAAGAAGGTACCTCTGAAAGCGCAACCCCTGAATCCGGCCCAGGTAGCGAAC | |
| | CGGCAACCTCCGGTTCTGAAACCCCAGGTACCTCTGAAAGCGCTACTCCGGAG | |
| | TCTGGCCCAGGTACCTCTACTGAACCGTCTGAGGGTAGCGCTCCAGGTACTTC | |
| | TACTGAACCGTCCGAAGGTAGCGCACCAGGTACTTCTACCGAACCGTCCGAA | |
| | GGCAGCGCTCCAGGTACCTCTACTGAACCTTCCGAGGGCAGCGCTCCAGGTAC | |
| | CTCTACCGAACCTTCTGAAGGTAGCGCACCAGGTACTTCTACCGAACCGTCCG | |
| | AGGGTAGCGCACCAGGTAGCCCAGCAGGTTCTCCTACCTCCACCGAGGAAGG | |
| | TACTTCTACCGAACCGTCCGAGGGTAGCGCACCAGGTACCTCTGAAAGCGCA | |
| | ACTCCTGAGTCTGGCCCAGGTAGCGAACCTGCTACCTCCGGCTCTGAGACTCC | |
| | AGGTACCTCTGAAAGCGCAACCCCGGAATCTGGTCCAGGTAGCGAACCTGCA | |
| | ACCTCTGGCTCTGAAACCCCAGGTACCTCTGAAAGCGCTACTCCTGAATCTGG | |
| | CCCAGGTACTTCTACTGAACCGTCCGAGGGCAGCGCACCAGGTACTTCTGAAA | |
| | GCGCTACTCCTGAGTCCGGCCCAGGTAGCCCGGCTGGCTCTCCGACTTCCACC | |
| | GAGGAAGGTAGCCCGGCTGGCTCTCCAACTTCTACTGAAGAAGGTAGCCCGG | |
| | CAGGCTCTCCGACCTCTACTGAGGAAGGTACTTCTGAAAGCGCAACCCCGGA | |
| | GTCCGGCCCAGGTACCTCTACCGAACCGTCTGAGGGCAGCGCACCAGGTACC | |
| | TCTGAAAGCGCAACTCCTGAGTCTGGCCCAGGTAGCGAACCTGCTACCTCCGG | |
| | CTCTGAGACTCCAGGTACCTCTGAAAGCGCAACCCCGGAATCTGGTCCAGGTA | |
| | GCGAACCTGCAACCTCTGGCTCTGAAACCCCAGGTACCTCTGAAAGCGCTACT | |
| | CCTGAATCTGGCCCAGGTACTTCTACTGAACCGTCCGAGGGCAGCGCACCAG | |
| | GTAGCCCTGCTGGCTCTCCAACCTCCACCGAAGAAGGTACCTCTGAAAGCGCA | |
| | ACCCCTGAATCCGGCCCAGGTAGCGAACCGGCAACCTCCGGTTCTGAAACCC | |
| | CAGGTACTTCTGAAAGCGCTACTCCTGAGTCCGGCCCAGGTAGCCCGGCTGGC | |
| | TCTCCGACTTCCACCGAGGAAGGTAGCCCGGCTGGCTCTCCAACTTCTACTGA | |
| | AGAAGGTACTTCTACCGAACCTTCCGAGGGCAGCGCACCAGGTACTTCTGAA | |
| | AGCGCTACCCCTGAGTCCGGCCCAGGTACTTCTGAAAGCGCTACTCCTGAATC | |
| | CGGTCCAGGTACTTCTGAAAGCGCTACCCCGGAATCTGGCCCAGGTAGCGAA | |
| | CCGGCTACTTCTGGTTCTGAAACCCCAGGTAGCGAACCGGCTACCTCCGGTTC | |
| | TGAAACTCCAGGTAGCCCAGCAGGCTCTCCGACTTCCACTGAGGAAGGTACTT | |
| | CTACTGAACCTTCCGAAGGCAGCGCACCAGGTACCTCTACTGAACCTTCTGAG | |
| | GGCAGCGCTCCAGGTAGCGAACCTGCAACCTCTGGCTCTGAAACCCCAGGTA | |
| | CCTCTGAAAGCGCTACTCCTGAATCTGGCCCAGGTACTTCTACTGAACCGTCC | |
| | GAGGGCAGCGCACCA | |
| AF864 | GGTTCTACCAGCGAATCTCCTTCTGGCACCGCTCCAGGTACCTCTCCTAGCGG | 220 |
| | CGAATCTTCTACCGCTCCAGGTTCTACTAGCGAATCTCCTTCTGGCACTGCACC | |
| | AGGTTCTACTAGCGAATCCCCGTCTGGTACTGCTCCAGGTACTTCTACTCCTG | |
| | AAAGCGGTTCCGCTTCTCCAGGTACCTCTACTCCGGAAAGCGGTTCTGCATCT | |
| | CCAGGTTCTACCAGCGAATCTCCTTCTGGCACCGCTCCAGGTTCTACTAGCGA | |
| | ATCCCCGTCTGGTACCGCACCAGGTACTTCTCCTAGCGGCGAATCTTCTACCG | |
| | CACCAGGTTCTACTAGCGAATCTCCGTCTGGCACTGCTCCAGGTACTTCTCCT | |
| | AGCGGTGAATCTTCTACCGCTCCAGGTACTTCCCCTAGCGGCGAATCTTCTAC | |
| | CGCTCCAGGTTCTACTAGCTCTACTGCAGAATCTCCGGGCCCAGGTACCTCTC | |
| | CTAGCGGTGAATCTTCTACCGCTCCAGGTACTTCTCCGAGCGGTGAATCTTCT | |
| | ACCGCTCCAGGTTCTACTAGCTCTACTGCAGAATCTCCTGGCCCAGGTACCTC | |
| | TACTCCGGAAAGCGGCTCTGCATCTCCAGGTACTTCTACCCCTGAAAGCGGTT | |
| | CTGCATCTCCAGGTTCTACTAGCGAATCTCCTTCTGGCACTGCACCAGGTTCTA | |
| | CCAGCGAATCTCCGTCTGGCACTGCACCAGGTACCTCTACCCCTGAAAGCGGT | |
| | TCCGCTTCTCCAGGTTCTACCAGCTCTACCGCAGAATCTCCTGGTCCAGGTAC | |
| | CTCTACTCCGGAAAGCGGCTCTGCATCTCCAGGTTCTACTAGCGAATCTCCTT | |
| | CTGGCACTGCACCAGGTACTTCTCCGAGCGGTGAATCTTCTACCGCACCAGGT | |
| | TCTACTAGCTCTACCGCTGAATCTCCGGGCCCAGGTACTTCTCCGAGCGGTGA | |
| | ATCTTCTACTGCTCCAGGTACCTCTACTCCTGAAAGCGGTTCTGCATCTCCAGG | |
| | TTCCACTAGCTCTACCGCAGAATCTCCGGGCCCAGGTTCTACTAGCTCTACTG | |
| | CTGAATCTCCTGGCCCAGGTTCTACTAGCTCTACTGCTGAATCTCCGGGTCCA | |
| | GGTTCTACCAGCTCTACTGCTGAATCTCCTGGTCCAGGTACCTCCCCGAGCGG | |
| | TGAATCTTCTACTGCACCAGGTTCTACTAGCGAATCTCCTTCTGGCACTGCACC | |
| | AGGTTCTACCAGCGAATCTCCGTCTGGCACTGCACCAGGTACCTCTACCCCTG | |
| | AAAGCGGTCCXXXXXXXXXXXXTGCAAGCGCAAGCGGCGCGCCAAGCACGG | |
| | GAXXXXXXXXTAGCGAATCTCCTTCTGGTACCGCTCCAGGTTCTACCAGCGA | |
| | ATCCCCGTCTGGTACTGCTCCAGGTTCTACCAGCGAATCTCCTTCTGGTACTGC | |
| | ACCAGGTTCTACTAGCGAATCTCCTTCTGGTACCGCTCCAGGTTCTACCAGCG | |
| | AATCCCCGTCTGGTACTGCTCCAGGTTCTACCAGCGAATCTCCTTCTGGTACTG | |
| | CACCAGGTACTTCTACTCCGGAAAGCGGTTCCGCATCTCCAGGTACTTCTCCT | |
| | AGCGGTGAATCTTCTACTGCTCCAGGTACCTCTCCTAGCGGCGAATCTTCTAC | |
| | TGCTCCAGGTTCTACCAGCTCTACTGCTGAATCTCCGGGTCCAGGTACTTCCCC | |
| | GAGCGGTGAATCTTCTACTGCACCAGGTACTTCTACTCCGGAAAGCGGTTCCG | |
| | CTTCTCCAGGTTCTACCAGCGAATCTCCTTCTGGCACCGCTCCAGGTTCTACTA | |
| | GCGAATCCCCGTCTGGTACCGCACCAGGTACTTCTCCTAGCGGCGAATCTTCT | |
| | ACCGCACCAGGTTCTACTAGCGAATCCCCGTCTGGTACCGCACCAGGTACTTC | |
| | TACCCCGGAAAGCGGCTCTGCTTCTCCAGGTACTTCTACCCCGGAAAGCGGCT | |
| | CCGCATCTCCAGGTTCTACTAGCGAATCTCCTTCTGGTACCGCTCCAGGTACTT | |
| | CTACCCCTGAAAGCGGCTCCGCTTCTCCAGGTTCCACTAGCTCTACCGCTGAA | |
| | TCTCCGGGTCCAGGTTCTACCAGCGAATCTCCTTCTGGCACCGCTCCAGGTTCT | |
| | ACTAGCGAATCCCCGTCTGGTACCGCACCAGGTACTTCTCCTAGCGGCGAATC | |
| | TTCTACCGCACCAGGTTCTACCAGCTCTACTGCTGAATCTCCGGGTCCAGGTA | |
| | CTTCCCCGAGCGGTGAATCTTCTACTGCACCAGGTACTTCTACTCCGGAAAGC | |
| | GGTTCCGCTTCTCCAGGTACCTCCCCTAGCGGCGAATCTTCTACTGCTCCAGGT | |
| | ACCTCTCCTAGCGGCGAATCTTCTACCGCTCCAGGTACCTCCCCTAGCGGTGA | |
| | ATCTTCTACCGCACCAGGTTCTACTAGCTCTACTGCTGAATCTCCGGGTCCAG | |
| | GTTCTACCAGCTCTACTGCTGAATCTCCTGGTCCAGGTACCTCCCCGAGCGGT | |
| | GAATCTTCTACTGCACCAGGTTCTAGCCCTTCTGCTTCCACCGGTACCGGCCC | |
| | AGGTAGCTCTACTCCGTCTGGTGCAACTGGCTCTCCAGGTAGCTCTACTCCGT | |
| | CTGGTGCAACCGGCTCCCCA | |
| | XXXX was inserted in two areas where no sequence | |
| | information is available. | |
| AG864 | GGTGCTTCCCCGGGCACCAGCTCTACTGGTTCTCCAGGTTCTAGCCCGTCTGCT | 221 |
| | TCTACTGGTACTGGTCCAGGTTCTAGCCCTTCTGCTTCCACTGGTACTGGTCCA | |
| | GGTACCCCGGGTAGCGGTACCGCTTCTTCTTCTCCAGGTAGCTCTACTCCGTCT | |
| | GGTGCTACCGGCTCTCCAGGTTCTAACCCTTCTGCATCCACCGGTACCGGCCC | |
| | AGGTGCTTCTCCGGGCACCAGCTCTACTGGTTCTCCAGGTACCCCGGGCAGCG | |
| | GTACCGCATCTTCTTCTCCAGGTAGCTCTACTCCTTCTGGTGCAACTGGTTCTC | |
| | CAGGTACTCCTGGCAGCGGTACCGCTTCTTCTTCTCCAGGTGCTTCTCCTGGTA | |
| | CTAGCTCTACTGGTTCTCCAGGTGCTTCTCCGGGCACTAGCTCTACTGGTTCTC | |
| | CAGGTACCCCGGGTAGCGGTACTGCTTCTTCCTCTCCAGGTAGCTCTACCCCTT | |
| | CTGGTGCAACCGGCTCTCCAGGTGCTTCTCCGGGCACCAGCTCTACCGGTTCT | |
| | CCAGGTACCCCGGGTAGCGGTACCGCTTCTTCTTCTCCAGGTAGCTCTACTCC | |
| | GTCTGGTGCTACCGGCTCTCCAGGTTCTAACCCTTCTGCATCCACCGGTACCG | |
| | GCCCAGGTTCTAGCCCTTCTGCTTCCACCGGTACTGGCCCAGGTAGCTCTACC | |
| | CCTTCTGGTGCTACCGGCTCCCCAGGTAGCTCTACTCCTTCTGGTGCAACTGGC | |
| | TCTCCAGGTGCATCTCCGGGCACTAGCTCTACTGGTTCTCCAGGTGCATCCCCT | |
| | GGCACTAGCTCTACTGGTTCTCCAGGTGCTTCTCCTGGTACCAGCTCTACTGGT | |
| | TCTCCAGGTACTCCTGGCAGCGGTACCGCTTCTTCTTCTCCAGGTGCTTCTCCT | |
| | GGTACTAGCTCTACTGGTTCTCCAGGTGCTTCTCCGGGCACTAGCTCTACTGGT | |
| | TCTCCAGGTGCTTCCCCGGGCACTAGCTCTACCGGTTCTCCAGGTTCTAGCCCT | |
| | TCTGCATCTACTGGTACTGGCCCAGGTACTCCGGGCAGCGGTACTGCTTCTTC | |
| | CTCTCCAGGTGCATCTCCGGGCACTAGCTCTACTGGTTCTCCAGGTGCATCCC | |
| | CTGGCACTAGCTCTACTGGTTCTCCAGGTGCTTCTCCTGGTACCAGCTCTACTG | |
| | GTTCTCCAGGTAGCTCTACTCCGTCTGGTGCAACCGGTTCCCCAGGTAGCTCT | |
| | ACTCCTTCTGGTGCTACTGGCTCCCCAGGTGCATCCCCTGGCACCAGCTCTAC | |
| | CGGTTCTCCAGGTACCCCGGGCAGCGGTACCGCATCTTCCTCTCCAGGTAGCT | |
| | CTACCCCGTCTGGTGCTACCGGTTCCCCAGGTAGCTCTACCCCGTCTGGTGCA | |
| | ACCGGCTCCCCAGGTAGCTCTACTCCGTCTGGTGCAACCGGCTCCCCAGGTTC | |
| | TAGCCCGTCTGCTTCCACTGGTACTGGCCCAGGTGCTTCCCCGGGCACCAGCT | |
| | CTACTGGTTCTCCAGGTGCATCCCCGGGTACCAGCTCTACCGGTTCTCCAGGT | |
| | ACTCCTGGCAGCGGTACTGCATCTTCCTCTCCAGGTGCTTCTCCGGGCACCAG | |
| | CTCTACTGGTTCTCCAGGTGCATCTCCGGGCACTAGCTCTACTGGTTCTCCAGG | |
| | TGCATCCCCTGGCACTAGCTCTACTGGTTCTCCAGGTGCTTCTCCTGGTACCAG | |
| | CTCTACTGGTTCTCCAGGTACCCCTGGTAGCGGTACTGCTTCTTCCTCTCCAGG | |
| | TAGCTCTACTCCGTCTGGTGCTACCGGTTCTCCAGGTACCCCGGGTAGCGGTA | |
| | CCGCATCTTCTTCTCCAGGTAGCTCTACCCCGTCTGGTGCTACTGGTTCTCCAG | |
| | GTACTCCGGGCAGCGGTACTGCTTCTTCCTCTCCAGGTAGCTCTACCCCTTCTG | |
| | GTGCTACTGGCTCTCCAGGTAGCTCTACCCCGTCTGGTGCTACTGGCTCCCCA | |
| | GGTTCTAGCCCTTCTGCATCCACCGGTACCGGTCCAGGTTCTAGCCCGTCTGC | |
| | ATCTACTGGTACTGGTCCAGGTGCATCCCCGGGCACTAGCTCTACCGGTTCTC | |
| | CAGGTACTCCTGGTAGCGGTACTGCTTCTTCTTCTCCAGGTAGCTCTACTCCTT | |
| | CTGGTGCTACTGGTTCTCCAGGTTCTAGCCCTTCTGCATCCACCGGTACCGGCC | |
| | CAGGTTCTAGCCCGTCTGCTTCTACCGGTACTGGTCCAGGTGCTTCTCCGGGT | |
| | ACTAGCTCTACTGGTTCTCCAGGTGCATCTCCTGGTACTAGCTCTACTGGTTCT | |
| | CCAGGTAGCTCTACTCCGTCTGGTGCAACCGGCTCTCCAGGTTCTAGCCCTTCT | |
| | GCATCTACCGGTACTGGTCCAGGTGCATCCCCTGGTACCAGCTCTACCGGTTC | |
| | TCCAGGTTCTAGCCCTTCTGCTTCTACCGGTACCGGTCCAGGTACCCCTGGCA | |
| | GCGGTACCGCATCTTCCTCTCCAGGTAGCTCTACTCCGTCTGGTGCAACCGGT | |
| | TCCCCAGGTAGCTCTACTCCTTCTGGTGCTACTGGCTCCCCAGGTGCATCCCCT | |
| | GGCACCAGCTCTACCGGTTCTCCA | |
| AM923 | ATGGCTGAACCTGCTGGCTCTCCAACCTCCACTGAGGAAGGTGCATCCCCGGG | 222 |
| | CACCAGCTCTACCGGTTCTCCAGGTAGCTCTACCCCGTCTGGTGCTACCGGCT | |
| | CTCCAGGTAGCTCTACCCCGTCTGGTGCTACTGGCTCTCCAGGTACTTCTACTG | |
| | AACCGTCTGAAGGCAGCGCACCAGGTAGCGAACCGGCTACTTCCGGTTCTGA | |
| | AACCCCAGGTAGCCCAGCAGGTTCTCCAACTTCTACTGAAGAAGGTTCTACCA | |
| | GCTCTACCGCAGAATCTCCTGGTCCAGGTACCTCTACTCCGGAAAGCGGCTCT | |
| | GCATCTCCAGGTTCTACTAGCGAATCTCCTTCTGGCACTGCACCAGGTTCTACT | |
| | AGCGAATCCCCGTCTGGTACTGCTCCAGGTACTTCTACTCCTGAAAGCGGTTC | |
| | CGCTTCTCCAGGTACCTCTACTCCGGAAAGCGGTTCTGCATCTCCAGGTAGCG | |
| | AACCGGCAACCTCCGGCTCTGAAACCCCAGGTACCTCTGAAAGCGCTACTCCT | |
| | GAATCCGGCCCAGGTAGCCCGGCAGGTTCTCCGACTTCCACTGAGGAAGGTA | |
| | CCTCTACTGAACCTTCTGAGGGCAGCGCTCCAGGTACTTCTGAAAGCGCTACC | |
| | CCGGAGTCCGGTCCAGGTACTTCTACTGAACCGTCCGAAGGTAGCGCACCAG | |
| | GTACTTCTACCGAACCGTCCGAGGGTAGCGCACCAGGTAGCCCAGCAGGTTCT | |
| | CCTACCTCCACCGAGGAAGGTACTTCTACCGAACCGTCCGAGGGTAGCGCAC | |
| | CAGGTACTTCTACCGAACCTTCCGAGGGCAGCGCACCAGGTACTTCTGAAAGC | |
| | GCTACCCCTGAGTCCGGCCCAGGTACTTCTGAAAGCGCTACTCCTGAATCCGG | |
| | TCCAGGTACCTCTACTGAACCTTCCGAAGGCAGCGCTCCAGGTACCTCTACCG | |
| | AACCGTCCGAGGGCAGCGCACCAGGTACTTCTGAAAGCGCAACCCCTGAATC | |
| | CGGTCCAGGTACTTCTACTGAACCTTCCGAAGGTAGCGCTCCAGGTAGCGAAC | |
| | CTGCTACTTCTGGTTCTGAAACCCCAGGTAGCCCGGCTGGCTCTCCGACCTCC | |
| | ACCGAGGAAGGTAGCTCTACCCCGTCTGGTGCTACTGGTTCTCCAGGTACTCC | |
| | GGGCAGCGGTACTGCTTCTTCCTCTCCAGGTAGCTCTACCCCTTCTGGTGCTAC | |
| | TGGCTCTCCAGGTACCTCTACCGAACCGTCCGAGGGTAGCGCACCAGGTACCT | |
| | CTACTGAACCGTCTGAGGGTAGCGCTCCAGGTAGCGAACCGGCAACCTCCGG | |
| | TTCTGAAACTCCAGGTAGCCCTGCTGGCTCTCCGACTTCTACTGAGGAAGGTA | |
| | GCCCGGCTGGTTCTCCGACTTCTACTGAGGAAGGTACTTCTACCGAACCTTCC | |
| | GAAGGTAGCGCTCCAGGTGCAAGCGCAAGCGGCGCGCCAAGCACGGGAGGT | |
| | ACTTCTGAAAGCGCTACTCCTGAGTCCGGCCCAGGTAGCCCGGCTGGCTCTCC | |
| | GACTTCCACCGAGGAAGGTAGCCCGGCTGGCTCTCCAACTTCTACTGAAGAA | |
| | GGTTCTACCAGCTCTACCGCTGAATCTCCTGGCCCAGGTTCTACTAGCGAATC | |
| | TCCGTCTGGCACCGCACCAGGTACTTCCCCTAGCGGTGAATCTTCTACTGCAC | |
| | CAGGTACCCCTGGCAGCGGTACCGCTTCTTCCTCTCCAGGTAGCTCTACCCCG | |
| | TCTGGTGCTACTGGCTCTCCAGGTTCTAGCCCGTCTGCATCTACCGGTACCGG | |
| | CCCAGGTAGCGAACCGGCAACCTCCGGCTCTGAAACTCCAGGTACTTCTGAA | |
| | AGCGCTACTCCGGAATCCGGCCCAGGTAGCGAACCGGCTACTTCCGGCTCTGA | |
| | AACCCCAGGTTCCACCAGCTCTACTGCAGAATCTCCGGGCCCAGGTTCTACTA | |
| | GCTCTACTGCAGAATCTCCGGGTCCAGGTACTTCTCCTAGCGGCGAATCTTCT | |
| | ACCGCTCCAGGTAGCGAACCGGCAACCTCTGGCTCTGAAACTCCAGGTAGCG | |
| | AACCTGCAACCTCCGGCTCTGAAACCCCAGGTACTTCTACTGAACCTTCTGAG | |
| | GGCAGCGCACCAGGTTCTACCAGCTCTACCGCAGAATCTCCTGGTCCAGGTAC | |
| | CTCTACTCCGGAAAGCGGCTCTGCATCTCCAGGTTCTACTAGCGAATCTCCTT | |
| | CTGGCACTGCACCAGGTACTTCTACCGAACCGTCCGAAGGCAGCGCTCCAGGT | |
| | ACCTCTACTGAACCTTCCGAGGGCAGCGCTCCAGGTACCTCTACCGAACCTTC | |
| | TGAAGGTAGCGCACCAGGTAGCTCTACTCCGTCTGGTGCAACCGGCTCCCCAG | |
| | GTTCTAGCCCGTCTGCTTCCACTGGTACTGGCCCAGGTGCTTCCCCGGGCACC | |
| | AGCTCTACTGGTTCTCCAGGTAGCGAACCTGCTACCTCCGGTTCTGAAACCCC | |
| | AGGTACCTCTGAAAGCGCAACTCCGGAGTCTGGTCCAGGTAGCCCTGCAGGTT | |
| | CTCCTACCTCCACTGAGGAAGGTAGCTCTACTCCGTCTGGTGCAACCGGCTCC | |
| | CCAGGTTCTAGCCCGTCTGCTTCCACTGGTACTGGCCCAGGTGCTTCCCCGGG | |
| | CACCAGCTCTACTGGTTCTCCAGGTACCTCTGAAAGCGCTACTCCGGAGTCTG | |
| | GCCCAGGTACCTCTACTGAACCGTCTGAGGGTAGCGCTCCAGGTACTTCTACT | |
| | GAACCGTCCGAAGGTAGCGCACCA | |
| AE912 | ATGGCTGAACCTGCTGGCTCTCCAACCTCCACTGAGGAAGGTACCCCGGGTAG | 223 |
| | CGGTACTGCTTCTTCCTCTCCAGGTAGCTCTACCCCTTCTGGTGCAACCGGCTC | |
| | TCCAGGTGCTTCTCCGGGCACCAGCTCTACCGGTTCTCCAGGTAGCCCGGCTG | |
| | GCTCTCCTACCTCTACTGAGGAAGGTACTTCTGAAAGCGCTACTCCTGAGTCT | |
| | GGTCCAGGTACCTCTACTGAACCGTCCGAAGGTAGCGCTCCAGGTAGCCCAG | |
| | CAGGCTCTCCGACTTCCACTGAGGAAGGTACTTCTACTGAACCTTCCGAAGGC | |
| | AGCGCACCAGGTACCTCTACTGAACCTTCTGAGGGCAGCGCTCCAGGTACTTC | |
| | TGAAAGCGCTACCCCGGAATCTGGCCCAGGTAGCGAACCGGCTACTTCTGGTT | |
| | CTGAAACCCCAGGTAGCGAACCGGCTACCTCCGGTTCTGAAACTCCAGGTAG | |
| | CCCGGCAGGCTCTCCGACCTCTACTGAGGAAGGTACTTCTGAAAGCGCAACCC | |
| | CGGAGTCCGGCCCAGGTACCTCTACCGAACCGTCTGAGGGCAGCGCACCAGG | |
| | TACTTCTACCGAACCGTCCGAGGGTAGCGCACCAGGTAGCCCAGCAGGTTCTC | |
| | CTACCTCCACCGAGGAAGGTACTTCTACCGAACCGTCCGAGGGTAGCGCACC | |
| | AGGTACCTCTACTGAACCTTCTGAGGGCAGCGCTCCAGGTACTTCTGAAAGCG | |
| | CTACCCCGGAGTCCGGTCCAGGTACTTCTACTGAACCGTCCGAAGGTAGCGCA | |
| | CCAGGTACTTCTGAAAGCGCAACCCCTGAATCCGGTCCAGGTAGCGAACCGG | |
| | CTACTTCTGGCTCTGAGACTCCAGGTACTTCTACCGAACCGTCCGAAGGTAGC | |
| | GCACCAGGTACTTCTACTGAACCGTCTGAAGGTAGCGCACCAGGTACTTCTGA | |
| | AAGCGCAACCCCGGAATCCGGCCCAGGTACCTCTGAAAGCGCAACCCCGGAG | |
| | TCCGGCCCAGGTAGCCCTGCTGGCTCTCCAACCTCCACCGAAGAAGGTACCTC | |
| | TGAAAGCGCAACCCCTGAATCCGGCCCAGGTAGCGAACCGGCAACCTCCGGT | |
| | TCTGAAACCCCAGGTACCTCTGAAAGCGCTACTCCGGAGTCTGGCCCAGGTAC | |
| | CTCTACTGAACCGTCTGAGGGTAGCGCTCCAGGTACTTCTACTGAACCGTCCG | |
| | AAGGTAGCGCACCAGGTACTTCTACCGAACCGTCCGAAGGCAGCGCTCCAGG | |
| | TACCTCTACTGAACCTTCCGAGGGCAGCGCTCCAGGTACCTCTACCGAACCTT | |
| | CTGAAGGTAGCGCACCAGGTACTTCTACCGAACCGTCCGAGGGTAGCGCACC | |
| | AGGTAGCCCAGCAGGTTCTCCTACCTCCACCGAGGAAGGTACTTCTACCGAAC | |
| | CGTCCGAGGGTAGCGCACCAGGTACCTCTGAAAGCGCAACTCCTGAGTCTGG | |
| | CCCAGGTAGCGAACCTGCTACCTCCGGCTCTGAGACTCCAGGTACCTCTGAAA | |
| | GCGCAACCCCGGAATCTGGTCCAGGTAGCGAACCTGCAACCTCTGGCTCTGA | |
| | AACCCCAGGTACCTCTGAAAGCGCTACTCCTGAATCTGGCCCAGGTACTTCTA | |
| | CTGAACCGTCCGAGGGCAGCGCACCAGGTACTTCTGAAAGCGCTACTCCTGA | |
| | GTCCGGCCCAGGTAGCCCGGCTGGCTCTCCGACTTCCACCGAGGAAGGTAGC | |
| | CCGGCTGGCTCTCCAACTTCTACTGAAGAAGGTAGCCCGGCAGGCTCTCCGAC | |
| | CTCTACTGAGGAAGGTACTTCTGAAAGCGCAACCCCGGAGTCCGGCCCAGGT | |
| | ACCTCTACCGAACCGTCTGAGGGCAGCGCACCAGGTACCTCTGAAAGCGCAA | |
| | CTCCTGAGTCTGGCCCAGGTAGCGAACCTGCTACCTCCGGCTCTGAGACTCCA | |
| | GGTACCTCTGAAAGCGCAACCCCGGAATCTGGTCCAGGTAGCGAACCTGCAA | |
| | CCTCTGGCTCTGAAACCCCAGGTACCTCTGAAAGCGCTACTCCTGAATCTGGC | |
| | CCAGGTACTTCTACTGAACCGTCCGAGGGCAGCGCACCAGGTAGCCCTGCTG | |
| | GCTCTCCAACCTCCACCGAAGAAGGTACCTCTGAAAGCGCAACCCCTGAATCC | |
| | GGCCCAGGTAGCGAACCGGCAACCTCCGGTTCTGAAACCCCAGGTACTTCTG | |
| | AAAGCGCTACTCCTGAGTCCGGCCCAGGTAGCCCGGCTGGCTCTCCGACTTCC | |
| | ACCGAGGAAGGTAGCCCGGCTGGCTCTCCAACTTCTACTGAAGAAGGTACTTC | |
| | TACCGAACCTTCCGAGGGCAGCGCACCAGGTACTTCTGAAAGCGCTACCCCTG | |
| | AGTCCGGCCCAGGTACTTCTGAAAGCGCTACTCCTGAATCCGGTCCAGGTACT | |
| | TCTGAAAGCGCTACCCCGGAATCTGGCCCAGGTAGCGAACCGGCTACTTCTGG | |
| | TTCTGAAACCCCAGGTAGCGAACCGGCTACCTCCGGTTCTGAAACTCCAGGTA | |
| | GCCCAGCAGGCTCTCCGACTTCCACTGAGGAAGGTACTTCTACTGAACCTTCC | |
| | GAAGGCAGCGCACCAGGTACCTCTACTGAACCTTCTGAGGGCAGCGCTCCAG | |
| | GTAGCGAACCTGCAACCTCTGGCTCTGAAACCCCAGGTACCTCTGAAAGCGCT | |
| | ACTCCTGAATCTGGCCCAGGTACTTCTACTGAACCGTCCGAGGGCAGCGCACC | |
| | A | |
| AM1318 | GGTACTTCTACTGAACCGTCTGAAGGCAGCGCACCAGGTAGCGAACCGGCTA | 224 |
| | CTTCCGGTTCTGAAACCCCAGGTAGCCCAGCAGGTTCTCCAACTTCTACTGAA | |
| | GAAGGTTCTACCAGCTCTACCGCAGAATCTCCTGGTCCAGGTACCTCTACTCC | |
| | GGAAAGCGGCTCTGCATCTCCAGGTTCTACTAGCGAATCTCCTTCTGGCACTG | |
| | CACCAGGTTCTACTAGCGAATCCCCGTCTGGTACTGCTCCAGGTACTTCTACT | |
| | CCTGAAAGCGGTTCCGCTTCTCCAGGTACCTCTACTCCGGAAAGCGGTTCTGC | |
| | ATCTCCAGGTAGCGAACCGGCAACCTCCGGCTCTGAAACCCCAGGTACCTCTG | |
| | AAAGCGCTACTCCTGAATCCGGCCCAGGTAGCCCGGCAGGTTCTCCGACTTCC | |
| | ACTGAGGAAGGTACCTCTACTGAACCTTCTGAGGGCAGCGCTCCAGGTACTTC | |
| | TGAAAGCGCTACCCCGGAGTCCGGTCCAGGTACTTCTACTGAACCGTCCGAAG | |
| | GTAGCGCACCAGGTACTTCTACCGAACCGTCCGAGGGTAGCGCACCAGGTAG | |
| | CCCAGCAGGTTCTCCTACCTCCACCGAGGAAGGTACTTCTACCGAACCGTCCG | |
| | AGGGTAGCGCACCAGGTACTTCTACCGAACCTTCCGAGGGCAGCGCACCAGG | |
| | TACTTCTGAAAGCGCTACCCCTGAGTCCGGCCCAGGTACTTCTGAAAGCGCTA | |
| | CTCCTGAATCCGGTCCAGGTACCTCTACTGAACCTTCCGAAGGCAGCGCTCCA | |
| | GGTACCTCTACCGAACCGTCCGAGGGCAGCGCACCAGGTACTTCTGAAAGCG | |
| | CAACCCCTGAATCCGGTCCAGGTACTTCTACTGAACCTTCCGAAGGTAGCGCT | |
| | CCAGGTAGCGAACCTGCTACTTCTGGTTCTGAAACCCCAGGTAGCCCGGCTGG | |
| | CTCTCCGACCTCCACCGAGGAAGGTAGCTCTACCCCGTCTGGTGCTACTGGTT | |
| | CTCCAGGTACTCCGGGCAGCGGTACTGCTTCTTCCTCTCCAGGTAGCTCTACC | |
| | CCTTCTGGTGCTACTGGCTCTCCAGGTACCTCTACCGAACCGTCCGAGGGTAG | |
| | CGCACCAGGTACCTCTACTGAACCGTCTGAGGGTAGCGCTCCAGGTAGCGAA | |
| | CCGGCAACCTCCGGTTCTGAAACTCCAGGTAGCCCTGCTGGCTCTCCGACTTC | |
| | TACTGAGGAAGGTAGCCCGGCTGGTTCTCCGACTTCTACTGAGGAAGGTACTT | |
| | CTACCGAACCTTCCGAAGGTAGCGCTCCAGGTCCAGAACCAACGGGGCCGGC | |
| | CCCAAGCGGAGGTAGCGAACCGGCAACCTCCGGCTCTGAAACCCCAGGTACC | |
| | TCTGAAAGCGCTACTCCTGAATCCGGCCCAGGTAGCCCGGCAGGTTCTCCGAC | |
| | TTCCACTGAGGAAGGTACTTCTGAAAGCGCTACTCCTGAGTCCGGCCCAGGTA | |
| | GCCCGGCTGGCTCTCCGACTTCCACCGAGGAAGGTAGCCCGGCTGGCTCTCCA | |
| | ACTTCTACTGAAGAAGGTACTTCTGAAAGCGCTACTCCTGAGTCCGGCCCAGG | |
| | TAGCCCGGCTGGCTCTCCGACTTCCACCGAGGAAGGTAGCCCGGCTGGCTCTC | |
| | CAACTTCTACTGAAGAAGGTTCTACCAGCTCTACCGCTGAATCTCCTGGCCCA | |
| | GGTTCTACTAGCGAATCTCCGTCTGGCACCGCACCAGGTACTTCCCCTAGCGG | |
| | TGAATCTTCTACTGCACCAGGTTCTACCAGCGAATCTCCTTCTGGCACCGCTCC | |
| | AGGTTCTACTAGCGAATCCCCGTCTGGTACCGCACCAGGTACTTCTCCTAGCG | |
| | GCGAATCTTCTACCGCACCAGGTACTTCTACCGAACCTTCCGAGGGCAGCGCA | |
| | CCAGGTACTTCTGAAAGCGCTACCCCTGAGTCCGGCCCAGGTACTTCTGAAAG | |
| | CGCTACTCCTGAATCCGGTCCAGGTAGCGAACCGGCAACCTCTGGCTCTGAAA | |
| | CCCCAGGTACCTCTGAAAGCGCTACTCCGGAATCTGGTCCAGGTACTTCTGAA | |
| | AGCGCTACTCCGGAATCCGGTCCAGGTACCTCTACTGAACCTTCTGAGGGCAG | |
| | CGCTCCAGGTACTTCTGAAAGCGCTACCCCGGAGTCCGGTCCAGGTACTTCTA | |
| | CTGAACCGTCCGAAGGTAGCGCACCAGGTACCTCCCCTAGCGGCGAATCTTCT | |
| | ACTGCTCCAGGTACCTCTCCTAGCGGCGAATCTTCTACCGCTCCAGGTACCTC | |
| | CCCTAGCGGTGAATCTTCTACCGCACCAGGTACTTCTACCGAACCGTCCGAGG | |
| | GTAGCGCACCAGGTAGCCCAGCAGGTTCTCCTACCTCCACCGAGGAAGGTAC | |
| | TTCTACCGAACCGTCCGAGGGTAGCGCACCAGGTTCTAGCCCTTCTGCTTCCA | |
| | CCGGTACCGGCCCAGGTAGCTCTACTCCGTCTGGTGCAACTGGCTCTCCAGGT | |
| | AGCTCTACTCCGTCTGGTGCAACCGGCTCCCCAGGTAGCTCTACCCCGTCTGG | |
| | TGCTACCGGCTCTCCAGGTAGCTCTACCCCGTCTGGTGCAACCGGCTCCCCAG | |
| | GTGCATCCCCGGGTACTAGCTCTACCGGTTCTCCAGGTGCAAGCGCAAGCGGC | |
| | GCGCCAAGCACGGGAGGTACTTCTCCGAGCGGTGAATCTTCTACCGCACCAG | |
| | GTTCTACTAGCTCTACCGCTGAATCTCCGGGCCCAGGTACTTCTCCGAGCGGT | |
| | GAATCTTCTACTGCTCCAGGTACCTCTGAAAGCGCTACTCCGGAGTCTGGCCC | |
| | AGGTACCTCTACTGAACCGTCTGAGGGTAGCGCTCCAGGTACTTCTACTGAAC | |
| | CGTCCGAAGGTAGCGCACCAGGTTCTAGCCCTTCTGCATCTACTGGTACTGGC | |
| | CCAGGTAGCTCTACTCCTTCTGGTGCTACCGGCTCTCCAGGTGCTTCTCCGGGT | |
| | ACTAGCTCTACCGGTTCTCCAGGTACTTCTACTCCGGAAAGCGGTTCCGCATC | |
| | TCCAGGTACTTCTCCTAGCGGTGAATCTTCTACTGCTCCAGGTACCTCTCCTAG | |
| | CGGCGAATCTTCTACTGCTCCAGGTACTTCTGAAAGCGCAACCCCTGAATCCG | |
| | GTCCAGGTAGCGAACCGGCTACTTCTGGCTCTGAGACTCCAGGTACTTCTACC | |
| | GAACCGTCCGAAGGTAGCGCACCAGGTTCTACCAGCGAATCCCCTTCTGGTAC | |
| | TGCTCCAGGTTCTACCAGCGAATCCCCTTCTGGCACCGCACCAGGTACTTCTA | |
| | CCCCTGAAAGCGGCTCCGCTTCTCCAGGTAGCCCGGCAGGCTCTCCGACCTCT | |
| | ACTGAGGAAGGTACTTCTGAAAGCGCAACCCCGGAGTCCGGCCCAGGTACCT | |
| | CTACCGAACCGTCTGAGGGCAGCGCACCAGGTAGCCCTGCTGGCTCTCCAACC | |
| | TCCACCGAAGAAGGTACCTCTGAAAGCGCAACCCCTGAATCCGGCCCAGGTA | |
| | GCGAACCGGCAACCTCCGGTTCTGAAACCCCAGGTAGCTCTACCCCGTCTGGT | |
| | GCTACCGGTTCCCCAGGTGCTTCTCCTGGTACTAGCTCTACCGGTTCTCCAGGT | |
| | AGCTCTACCCCGTCTGGTGCTACTGGCTCTCCAGGTTCTACTAGCGAATCCCC | |
| | GTCTGGTACTGCTCCAGGTACTTCCCCTAGCGGTGAATCTTCTACTGCTCCAG | |
| | GTTCTACCAGCTCTACCGCAGAATCTCCGGGTCCAGGTAGCTCTACCCCTTCT | |
| | GGTGCAACCGGCTCTCCAGGTGCATCCCCGGGTACCAGCTCTACCGGTTCTCC | |
| | AGGTACTCCGGGTAGCGGTACCGCTTCTTCCTCTCCAGGTAGCCCTGCTGGCT | |
| | CTCCGACTTCTACTGAGGAAGGTAGCCCGGCTGGTTCTCCGACTTCTACTGAG | |
| | GAAGGTACTTCTACCGAACCTTCCGAAGGTAGCGCTCCA | |
| BC864 | GGTACTTCCACCGAACCATCCGAACCAGGTAGCGCAGGTACTTCCACCGAAC | 225 |
| | CATCCGAACCTGGCAGCGCAGGTAGCGAACCGGCAACCTCTGGTACTGAACC | |
| | ATCAGGTAGCGGCGCATCCGAGCCTACCTCTACTGAACCAGGTAGCGAACCG | |
| | GCTACCTCCGGTACTGAGCCATCAGGTAGCGAACCGGCAACTTCCGGTACTGA | |
| | ACCATCAGGTAGCGAACCGGCAACTTCCGGCACTGAACCATCAGGTAGCGGT | |
| | GCATCTGAGCCGACCTCTACTGAACCAGGTACTTCTACTGAACCATCTGAGCC | |
| | GGGCAGCGCAGGTAGCGAACCAGCTACTTCTGGCACTGAACCATCAGGTACT | |
| | TCTACTGAACCATCCGAACCAGGTAGCGCAGGTAGCGAACCTGCTACCTCTGG | |
| | TACTGAGCCATCAGGTAGCGAACCGGCTACCTCTGGTACTGAACCATCAGGTA | |
| | CTTCTACCGAACCATCCGAGCCTGGTAGCGCAGGTACTTCTACCGAACCATCC | |
| | GAGCCAGGCAGCGCAGGTAGCGAACCGGCAACCTCTGGCACTGAGCCATCAG | |
| | GTAGCGAACCAGCAACTTCTGGTACTGAACCATCAGGTACTAGCGAGCCATCT | |
| | ACTTCCGAACCAGGTGCAGGTAGCGGCGCATCCGAACCTACTTCCACTGAACC | |
| | AGGTACTAGCGAGCCATCCACCTCTGAACCAGGTGCAGGTAGCGAACCGGCA | |
| | ACTTCCGGCACTGAACCATCAGGTAGCGAACCGGCTACCTCTGGTACTGAACC | |
| | ATCAGGTACTTCTACCGAACCATCCGAGCCTGGTAGCGCAGGTACTTCTACCG | |
| | AACCATCCGAGCCAGGCAGCGCAGGTAGCGGTGCATCCGAGCCGACCTCTAC | |
| | TGAACCAGGTAGCGAACCAGCAACTTCTGGCACTGAGCCATCAGGTAGCGAA | |
| | CCAGCTACCTCTGGTACTGAACCATCAGGTAGCGAACCGGCTACTTCCGGCAC | |
| | TGAACCATCAGGTAGCGAACCAGCAACCTCCGGTACTGAACCATCAGGTACT | |
| | TCCACTGAACCATCCGAACCGGGTAGCGCAGGTAGCGAACCGGCAACTTCCG | |
| | GCACTGAACCATCAGGTAGCGGTGCATCTGAGCCGACCTCTACTGAACCAGG | |
| | TACTTCTACTGAACCATCTGAGCCGGGCAGCGCAGGTAGCGAACCTGCAACCT | |
| | CCGGCACTGAGCCATCAGGTAGCGGCGCATCTGAACCAACCTCTACTGAACC | |
| | AGGTACTTCCACCGAACCATCTGAGCCAGGCAGCGCAGGTAGCGGCGCATCT | |
| | GAACCAACCTCTACTGAACCAGGTAGCGAACCAGCAACTTCTGGTACTGAAC | |
| | CATCAGGTAGCGGCGCATCTGAGCCTACTTCCACTGAACCAGGTAGCGAACC | |
| | GGCAACTTCCGGCACTGAACCATCAGGTAGCGGTGCATCTGAGCCGACCTCTA | |
| | CTGAACCAGGTACTTCTACTGAACCATCTGAGCCGGGCAGCGCAGGTAGCGA | |
| | ACCGGCAACTTCCGGCACTGAACCATCAGGTAGCGGTGCATCTGAGCCGACC | |
| | TCTACTGAACCAGGTACTTCTACTGAACCATCTGAGCCGGGCAGCGCAGGTAG | |
| | CGAACCAGCTACTTCTGGCACTGAACCATCAGGTACTTCTACTGAACCATCCG | |
| | AACCAGGTAGCGCAGGTAGCGAACCTGCTACCTCTGGTACTGAGCCATCAGG | |
| | TACTTCTACTGAACCATCCGAGCCGGGTAGCGCAGGTACTTCCACTGAACCAT | |
| | CTGAACCTGGTAGCGCAGGTACTTCCACTGAACCATCCGAACCAGGTAGCGC | |
| | AGGTACTTCTACTGAACCATCCGAGCCGGGTAGCGCAGGTACTTCCACTGAAC | |
| | CATCTGAACCTGGTAGCGCAGGTACTTCCACTGAACCATCCGAACCAGGTAGC | |
| | GCAGGTACTAGCGAACCATCCACCTCCGAACCAGGCGCAGGTAGCGGTGCAT | |
| | CTGAACCGACTTCTACTGAACCAGGTACTTCCACTGAACCATCTGAGCCAGGT | |
| | AGCGCAGGTACTTCCACCGAACCATCCGAACCAGGTAGCGCAGGTACTTCCA | |
| | CCGAACCATCCGAACCTGGCAGCGCAGGTAGCGAACCGGCAACCTCTGGTAC | |
| | TGAACCATCAGGTAGCGGTGCATCCGAGCCGACCTCTACTGAACCAGGTAGC | |
| | GAACCAGCAACTTCTGGCACTGAGCCATCAGGTAGCGAACCAGCTACCTCTG | |
| | GTACTGAACCATCAGGTAGCGAACCGGCAACCTCTGGCACTGAGCCATCAGG | |
| | TAGCGAACCAGCAACTTCTGGTACTGAACCATCAGGTACTAGCGAGCCATCTA | |
| | CTTCCGAACCAGGTGCAGGTAGCGAACCTGCAACCTCCGGCACTGAGCCATC | |
| | AGGTAGCGGCGCATCTGAACCAACCTCTACTGAACCAGGTACTTCCACCGAA | |
| | CCATCTGAGCCAGGCAGCGCAGGTAGCGAACCTGCAACCTCCGGCACTGAGC | |
| | CATCAGGTAGCGGCGCATCTGAACCAACCTCTACTGAACCAGGTACTTCCACC | |
| | GAACCATCTGAGCCAGGCAGCGCA | |
| BD864 | GGTAGCGAAACTGCTACTTCCGGCTCTGAGACTGCAGGTACTAGTGAATCCGC | 226 |
| | AACTAGCGAATCTGGCGCAGGTAGCACTGCAGGCTCTGAGACTTCCACTGAA | |
| | GCAGGTACTAGCGAGTCCGCAACCAGCGAATCCGGCGCAGGTAGCGAAACTG | |
| | CTACCTCTGGCTCCGAGACTGCAGGTAGCGAAACTGCAACCTCTGGCTCTGAA | |
| | ACTGCAGGTACTTCCACTGAAGCAAGTGAAGGCTCCGCATCAGGTACTTCCAC | |
| | CGAAGCAAGCGAAGGCTCCGCATCAGGTACTAGTGAGTCCGCAACTAGCGAA | |
| | TCCGGTGCAGGTAGCGAAACCGCTACCTCTGGTTCCGAAACTGCAGGTACTTC | |
| | TACCGAGGCTAGCGAAGGTTCTGCATCAGGTAGCACTGCTGGTTCCGAGACTT | |
| | CTACTGAAGCAGGTACTAGCGAATCTGCTACTAGCGAATCCGGCGCAGGTAC | |
| | TAGCGAATCCGCTACCAGCGAATCCGGCGCAGGTAGCGAAACTGCAACCTCT | |
| | GGTTCCGAGACTGCAGGTACTAGCGAGTCCGCTACTAGCGAATCTGGCGCAG | |
| | GTACTTCCACTGAAGCTAGTGAAGGTTCTGCATCAGGTAGCGAAACTGCTACT | |
| | TCTGGTTCCGAAACTGCAGGTAGCGAAACCGCTACCTCTGGTTCCGAAACTGC | |
| | AGGTACTTCTACCGAGGCTAGCGAAGGTTCTGCATCAGGTAGCACTGCTGGTT | |
| | CCGAGACTTCTACTGAAGCAGGTACTAGCGAGTCCGCTACTAGCGAATCTGGC | |
| | GCAGGTACTTCCACTGAAGCTAGTGAAGGTTCTGCATCAGGTAGCGAAACTG | |
| | CTACTTCTGGTTCCGAAACTGCAGGTAGCACTGCTGGCTCCGAGACTTCTACC | |
| | GAAGCAGGTAGCACTGCAGGTTCCGAAACTTCCACTGAAGCAGGTAGCGAAA | |
| | CTGCTACCTCTGGCTCTGAGACTGCAGGTACTAGCGAATCTGCTACTAGCGAA | |
| | TCCGGCGCAGGTACTAGCGAATCCGCTACCAGCGAATCCGGCGCAGGTAGCG | |
| | AAACTGCAACCTCTGGTTCCGAGACTGCAGGTACTAGCGAATCTGCTACTAGC | |
| | GAATCCGGCGCAGGTACTAGCGAATCCGCTACCAGCGAATCCGGCGCAGGTA | |
| | GCGAAACTGCAACCTCTGGTTCCGAGACTGCAGGTAGCGAAACCGCTACCTCT | |
| | GGTTCCGAAACTGCAGGTACTTCTACCGAGGCTAGCGAAGGTTCTGCATCAGG | |
| | TAGCACTGCTGGTTCCGAGACTTCTACTGAAGCAGGTAGCGAAACTGCTACTT | |
| | CCGGCTCTGAGACTGCAGGTACTAGTGAATCCGCAACTAGCGAATCTGGCGC | |
| | AGGTAGCACTGCAGGCTCTGAGACTTCCACTGAAGCAGGTAGCACTGCTGGTT | |
| | CCGAAACCTCTACCGAAGCAGGTAGCACTGCAGGTTCTGAAACCTCCACTGA | |
| | AGCAGGTACTTCCACTGAGGCTAGTGAAGGCTCTGCATCAGGTAGCACTGCTG | |
| | GTTCCGAAACCTCTACCGAAGCAGGTAGCACTGCAGGTTCTGAAACCTCCACT | |
| | GAAGCAGGTACTTCCACTGAGGCTAGTGAAGGCTCTGCATCAGGTAGCACTG | |
| | CAGGTTCTGAGACTTCCACCGAAGCAGGTAGCGAAACTGCTACTTCTGGTTCC | |
| | GAAACTGCAGGTACTTCCACTGAAGCTAGTGAAGGTTCCGCATCAGGTACTA | |
| | GTGAGTCCGCAACCAGCGAATCCGGCGCAGGTAGCGAAACCGCAACCTCCGG | |
| | TTCTGAAACTGCAGGTACTAGCGAATCCGCAACCAGCGAATCTGGCGCAGGT | |
| | ACTAGTGAGTCCGCAACCAGCGAATCCGGCGCAGGTAGCGAAACCGCAACCT | |
| | CCGGTTCTGAAACTGCAGGTACTAGCGAATCCGCAACCAGCGAATCTGGCGC | |
| | AGGTAGCGAAACTGCTACTTCCGGCTCTGAGACTGCAGGTACTTCCACCGAAG | |
| | CAAGCGAAGGTTCCGCATCAGGTACTTCCACCGAGGCTAGTGAAGGCTCTGC | |
| | ATCAGGTAGCACTGCTGGCTCCGAGACTTCTACCGAAGCAGGTAGCACTGCA | |
| | GGTTCCGAAACTTCCACTGAAGCAGGTAGCGAAACTGCTACCTCTGGCTCTGA | |
| | GACTGCAGGTACTAGCGAATCTGCTACTAGCGAATCCGGCGCAGGTACTAGC | |
| | GAATCCGCTACCAGCGAATCCGGCGCAGGTAGCGAAACTGCAACCTCTGGTT | |
| | CCGAGACTGCAGGTAGCGAAACTGCTACTTCCGGCTCCGAGACTGCAGGTAG | |
| | CGAAACTGCTACTTCTGGCTCCGAAACTGCAGGTACTTCTACTGAGGCTAGTG | |
| | AAGGTTCCGCATCAGGTACTAGCGAGTCCGCAACCAGCGAATCCGGCGCAGG | |
| | TAGCGAAACTGCTACCTCTGGCTCCGAGACTGCAGGTAGCGAAACTGCAACC | |
| | TCTGGCTCTGAAACTGCAGGTACTAGCGAATCTGCTACTAGCGAATCCGGCGC | |
| | AGGTACTAGCGAATCCGCTACCAGCGAATCCGGCGCAGGTAGCGAAACTGCA | |
| | ACCTCTGGTTCCGAGACTGCA | |

[0277] One may clone the library of XTEN-encoding genes into one or more expression vectors known in the art. To facilitate the identification of well-expressing library members, one can construct the library as fusion to a reporter protein. Non-limiting examples of suitable reporter genes are green fluorescent protein, luciferace, alkaline phosphatase, and beta-galactosidase. By screening, one can identify short XTEN sequences that can be expressed in high concentration in the host organism of choice. Subsequently, one can generate a library of random XTEN dimers and repeat the screen for high level of expression. Subsequently, one can screen the resulting constructs for a number of properties such as level of expression, protease stability, or binding to antiserum.

[0278] One aspect of the invention is to provide polynucleotide sequences encoding the components of the fusion protein wherein the creation of the sequence has undergone codon optimization. Of particular interest is codon optimization with the goal of improving expression of the polypeptide compositions and to improve the genetic stability of the encoding gene in the production hosts. For example, codon optimization is of particular importance for XTEN sequences that are rich in glycine or that have very repetitive amino acid sequences. Codon optimization is performed using computer programs (Gustafsson, C., et al. (2004) Trends Biotechnol, 22: 346-53), some of which minimize ribosomal pausing (Coda Genomics Inc.). In one embodiment, one can perform codon optimization by constructing codon libraries where all members of the library encode the same amino acid sequence but where codon usage is varied. Such libraries can be screened for highly expressing and genetically stable members that are particularly suitable for the large-scale production of XTEN-containing products. When designing XTEN sequences one can consider a number of properties. One can minimize the repetitiveness in the encoding DNA sequences. In addition, one can avoid or minimize the use of codons that are rarely used by the production host (e.g. the AGG and AGA arginine codons and one leucine codon in E. coli). In the case of E. coli, two glycine codons, GGA and GGG, are rarely used in highly expressed proteins. Thus codon optimization of the gene encoding XTEN sequences can be very desirable. DNA sequences that have a high level of glycine tend to have a high GC content that can lead to instability or low expression levels. Thus, when possible, it is preferred to choose codons such that the GC-content of XTEN-encoding sequence is suitable for the production organism that will be used to manufacture the XTEN.

[0279] Optionally, the full-length XTEN-encoding gene comprises one or more sequencing islands. In this context, sequencing islands are short-stretch sequences that are distinct from the XTEN library construct sequences and that include a restriction site not present or expected to be present in the full-length XTEN-encoding gene. In one embodiment, a sequencing island is the sequence 5′-AGGTGCAAGCGCAAGCGGCGCGCCAAGCACGGGAGGT-3′ (SEQ ID NO: 227). In another embodiment, a sequencing island is the sequence 5′-AGGTCCAGAACCAACGGGGCCGGCCCCAAGCGGAGGT-3′ (SEQ ID NO: 228).

[0280] In one embodiment, polynucleotide libraries are constructed using the disclosed methods wherein all members of the library encode the same amino acid sequence but the codon usage for the respective amino acids in the sequence is varied. Such libraries can be screened for highly expressing and genetically stable members that are particularly suitable for the large-scale production of XTEN-containing products.

[0281] Optionally, one can sequence clones in the library to eliminate isolates that contain undesirable sequences. The initial library of short XTEN sequences allows some variation in amino acid sequence. For instance one can randomize some codons such that a number of hydrophilic amino acids can occur in a particular position. During the process of iterative multimerization one can screen the resulting library members for other characteristics like solubility or protease resistance in addition to a screen for high-level expression.

[0282] Once the gene that encodes the XTEN of desired length and properties is selected, it is genetically fused at the desired location to the nucleotides encoding the GLP-2 gene(s) by cloning it into the construct adjacent and in frame with the gene coding for GLP-2, or alternatively in frame with nucleotides encoding a spacer/cleavage sequence linked to a terminal XTEN. The invention provides various permutations of the foregoing, depending on the GLP2-XTEN to be encoded. For example, a gene encoding a GLP2-XTEN fusion protein comprising a GLP-2 and two XTEN, such as embodied by formula III, as depicted above, the gene would have polynucleotides encoding GLP-2, and polynucleotides encoding two XTEN, which can be identical or different in composition and sequence length. In one non-limiting embodiment of the foregoing, the GLP-2 polynucleotides would encode native GLP-2 and the polynucleotides encoding the C-terminus XTEN would encode AE864 and the polynucleotides encoding an N-terminal XTEN AE912. The step of cloning the GLP-2 genes into the XTEN construct can occur through a ligation or multimerization step, as shown in FIG. 5 in a schematic flowchart of representative steps in the assembly of a GLP2-XTEN polynucleotide construct. Individual oligonucleotides 501 are annealed into sequence motifs 502 such as a 12 amino acid motif (“12-mer”), which is ligated to additional sequence motifs from a library that can multimerize to create a pool that encompasses the desired length of the XTEN 504, as well as ligated to a smaller concentration of an oligo containing BbsI, and KpnI restriction sites 503. The motif libraries can be limited to specific sequence XTEN families; e.g., AD, AE, AF, AG, AM, or AQ sequences of Table 3. As illustrated in FIG. 5, the XTEN polynucleotides encode a length, in this case, of 36 amino acid residues, but longer lengths can be achieved by this process. For example, multimerization can be performed by ligation, overlap extension, PCR assembly or similar cloning techniques known in the art. The resulting pool of ligation products is gel-purified and the band with the desired length of XTEN is cut, resulting in an isolated XTEN gene with a stopper sequence 505. The XTEN gene can be cloned into a stuffer vector. In this case, the vector encodes an optional CBD sequence 506 and a GFP gene 508. Digestion is than performed with BbsI/HindIII to remove 507 and 508 and place the stop codon. The resulting product is then cloned into a BsaI/HindIII digested vector containing a gene encoding the GLP-2, resulting in the gene 500 encoding a GLP2-XTEN fusion protein. As would be apparent to one of ordinary skill in the art, the methods can be applied to create constructs in alternative configurations and with varying XTEN lengths.

[0283] The constructs encoding GLP2-XTEN fusion proteins can be designed in different configurations of the components XTEN, GLP-2, and spacer sequences, such as shown in FIG. 8. In one embodiment, the construct comprises polynucleotide sequences complementary to, or those that encode a monomeric polypeptide of components in the following order (5′ to 3′) GLP-2 and XTEN. In another embodiment, the construct comprises polynucleotide sequences complementary to, or those that encode a monomeric polypeptide of components in the following order (5′ to 3′) XTEN and GLP-2. In another embodiment, the construct comprises polynucleotide sequences complementary to, or those that encode a monomeric polypeptide of components in the following order (5′ to 3′) XTEN, GLP-2, and a second XTEN. In another embodiment, the construct comprises polynucleotide sequences complementary to, or those that encode a monomeric polypeptide of components in the following order (5′ to 3′) GLP-2, spacer sequence, and XTEN. In another embodiment, the construct comprises polynucleotide sequences complementary to, or those that encode a monomeric polypeptide of components in the following order (5′ to 3′) XTEN, spacer sequence, and GLP-2. The spacer polynucleotides can optionally comprise sequences encoding cleavage sequences. As will be apparent to those of skill in the art, other permutations or multimers of the foregoing are possible.

[0284] The invention also encompasses polynucleotides comprising XTEN-encoding polynucleotide variants that have a high percentage of sequence identity compared to (a) a polynucleotide sequence from Table 7, or (b) sequences that are complementary to the polynucleotides of (a). A polynucleotide with a high percentage of sequence identity is one that has at least about an 80% nucleic acid sequence identity, alternatively at least about 81%, alternatively at least about 82%, alternatively at least about 83%, alternatively at least about 84%, alternatively at least about 85%, alternatively at least about 86%, alternatively at least about 87%, alternatively at least about 88%, alternatively at least about 89%, alternatively at least about 90%, alternatively at least about 91%, alternatively at least about 92%, alternatively at least about 93%, alternatively at least about 94%, alternatively at least about 95%, alternatively at least about 96%, alternatively at least about 97%, alternatively at least about 98%, and alternatively at least about 99% nucleic acid sequence identity compared to (a) or (b) of the foregoing, or that can hybridize with the target polynucleotide or its complement under stringent conditions.

[0285] Homology, sequence similarity or sequence identity of nucleotide or amino acid sequences may also be determined conventionally by using known software or computer programs such as the BestFit or Gap pairwise comparison programs (GCG Wisconsin Package, Genetics Computer Group, 575 Science Drive, Madison, Wis. 53711). BestFit uses the local homology algorithm of Smith and Waterman (Advances in Applied Mathematics. 1981. 2: 482-489), to find the best segment of identity or similarity between two sequences. Gap performs global alignments: all of one sequence with all of another similar sequence using the method of Needleman and Wunsch, (Journal of Molecular Biology. 1970. 48:443-453). When using a sequence alignment program such as BestFit, to determine the degree of sequence homology, similarity or identity, the default setting may be used, or an appropriate scoring matrix may be selected to optimize identity, similarity or homology scores.

[0286] Nucleic acid sequences that are “complementary” are those that are capable of base-pairing according to the standard Watson-Crick complementarity rules. As used herein, the term “complementary sequences” means nucleic acid sequences that are substantially complementary, as may be assessed by the same nucleotide comparison set forth above, or as defined as being capable of hybridizing to the polynucleotides that encode the GLP2-XTEN sequences under stringent conditions, such as those described herein.

[0287] The resulting polynucleotides encoding the GLP2-XTEN chimeric fusion proteins can then be individually cloned into an expression vector. The nucleic acid sequence is inserted into the vector by a variety of procedures. In general, DNA is inserted into an appropriate restriction endonuclease site(s) using techniques known in the art. Vector components generally include, but are not limited to, one or more of a signal sequence, an origin of replication, one or more marker genes, an enhancer element, a promoter, and a transcription termination sequence (FIG. 9). Construction of suitable vectors containing one or more of these components employs standard ligation techniques which are known to the skilled artisan. Such techniques are well known in the art and well described in the scientific and patent literature.

[0288] Various vectors are publicly available. The vector may, for example, be in the form of a plasmid, cosmid, viral particle, or phage that may conveniently be subjected to recombinant DNA procedures, and the choice of vector will often depend on the host cell into which it is to be introduced. Thus, the vector may be an autonomously replicating vector, i.e., a vector, which exists as an extrachromosomal entity, the replication of which is independent of chromosomal replication, e.g., a plasmid. Alternatively, the vector may be one which, when introduced into a host cell, is integrated into the host cell genome and replicated together with the chromosome(s) into which it has been integrated.

[0289] The invention provides for the use of plasmid vectors containing replication and control sequences that are compatible with and recognized by the host cell, and are operably linked to the GLP2-XTEN gene for controlled expression of the GLP2-XTEN fusion proteins. The vector ordinarily carries a replication site, as well as sequences that encode proteins that are capable of providing phenotypic selection in transformed cells. Such vector sequences are well known for a variety of bacteria, yeast, and viruses. Useful expression vectors that can be used include, for example, segments of chromosomal, non-chromosomal and synthetic DNA sequences. “Expression vector” refers to a DNA construct containing a DNA sequence that is operably linked to a suitable control sequence capable of effecting the expression of the DNA encoding the fusion protein in a suitable host. The requirements are that the vectors are replicable and viable in the host cell of choice. Low- or high-copy number vectors may be used as desired.

[0290] Suitable vectors include, but are not limited to, derivatives of SV40 and pcDNA and known bacterial plasmids such as col EI, pCR1, pBR322, pMal-C2, pET, pGEX as described by Smith, et al., Gene 57:31-40 (1988), pMB9 and derivatives thereof, plasmids such as RP4, phage DNAs such as the numerous derivatives of phage I such as NM98 9, as well as other phage DNA such as M13 and filamentous single stranded phage DNA; yeast plasmids such as the 2 micron plasmid or derivatives of the 2m plasmid, as well as centomeric and integrative yeast shuttle vectors; vectors useful in eukaryotic cells such as vectors useful in insect or mammalian cells; vectors derived from combinations of plasmids and phage DNAs, such as plasmids that have been modified to employ phage DNA or the expression control sequences; and the like. Yeast expression systems that can also be used in the present invention include, but are not limited to, the non-fusion pYES2 vector (Invitrogen), the fusion pYESHisA, B, C (Invitrogen), pRS vectors and the like.

[0291] The control sequences of the vector include a promoter to effect transcription, an optional operator sequence to control such transcription, a sequence encoding suitable mRNA ribosome binding sites, and sequences that control termination of transcription and translation. The promoter may be any DNA sequence, which shows transcriptional activity in the host cell of choice and may be derived from genes encoding proteins either homologous or heterologous to the host cell.

[0292] Examples of suitable promoters for directing the transcription of the DNA encoding the GLP2-XTEN in mammalian cells are the SV40 promoter (Subramani et al., Mol. Cell. Biol. 1 (1981), 854-864), the MT-1 (metallothionein gene) promoter (Palmiter et al., Science 222 (1983), 809-814), the CMV promoter (Boshart et al., Cell 41:521-530, 1985) or the adenovirus 2 major late promoter (Kaufman and Sharp, Mol. Cell. Biol, 2:1304-1319, 1982). The vector may also carry sequences such as UCOE (ubiquitous chromatin opening elements).

[0293] Examples of suitable promoters for use in filamentous fungus host cells are, for instance, the ADH3 promoter or the tpiA promoter. Examples of other useful promoters are those derived from the gene encoding A. oryzae TAKA amylase, Rhizomucor miehei aspartic proteinase, A. niger neutral α-amylase, A. niger acid stable α-amylase, A. niger or A. awamoriglucoamylase (gluA), Rhizomucor miehei lipase, A. oryzae alkaline protease, A. oryzae triose phosphate isomerase or A. nidulans acetamidase. Preferred are the TAKA-amylase and gluA promoters. Yeast expression systems that can also be used in the present invention include, but are not limited to, the non-fusion pYES2 vector (Invitrogen), the fusion pYESHisA, B, C (Invitrogen), pRS vectors and the like.

[0294] Promoters suitable for use in expression vectors with prokaryotic hosts include the β-lactamase and lactose promoter systems [Chang et al., Nature, 275:615 (1978); Goeddel et al., Nature, 281:544 (1979)], alkaline phosphatase, a tryptophan (trp) promoter system [Goeddel, Nucleic Acids Res., 8:4057 (1980); EP 36,776], and hybrid promoters such as the tac promoter [deBoer et al., Proc. Natl. Acad. Sci. USA, 80:21-25 (1983)], all is operably linked to the DNA encoding GLP2-XTEN polypeptides. Promoters for use in bacterial systems can also contain a Shine-Dalgarno (S.D.) sequence, operably linked to the DNA encoding GLP2-XTEN polypeptides.

[0295] The invention contemplates use of other expression systems including, for example, a baculovirus expression system with both non-fusion transfer vectors, such as, but not limited to pVL941 Summers, et al., Virology 84:390-402 (1978)), pVL1393 (Invitrogen), pVL1392 (Summers, et al., Virology 84:390-402 (1978) and Invitrogen) and pBlueBaclll (Invitrogen), and fusion transfer vectors such as, but not limited to, pAc7 00 (Summers, et al., Virology 84:390-402 (1978)), pAc701 and pAc70-2 (same as pAc700, with different reading frames), pAc360 Invitrogen) and pBlueBacHisA, B, C (Invitrogen) can be used.

[0296] The DNA sequences encoding the GLP2-XTEN may also, if necessary, be operably connected to a suitable terminator, such as the hGH terminator (Palmiter et al., Science 222, 1983, pp. 809-814) or the TPI1 terminators (Alber and Kawasaki, J. Mol. Appl. Gen. 1, 1982, pp. 419-434) or ADH3 (McKnight et al., The EMBO J. 4, 1985, pp. 2093-2099). Expression vectors may also contain a set of RNA splice sites located downstream from the promoter and upstream from the insertion site for the GLP2-XTEN sequence itself, including splice sites obtained from adenovirus. Also contained in the expression vectors is a polyadenylation signal located downstream of the insertion site. Particularly preferred polyadenylation signals include the early or late polyadenylation signal from SV40 (Kaufman and Sharp, ibid.), the polyadenylation signal from the adenovirus 5 Elb region, the hGH terminator (DeNoto et al. Nucl. Acids Res. 9:3719-3730, 1981). The expression vectors may also include a noncoding viral leader sequence, such as the adenovirus 2 tripartite leader, located between the promoter and the RNA splice sites; and enhancer sequences, such as the SV40 enhancer.

[0297] In one embodiment, the polynucleotide encoding a GLP2-XTEN fusion protein composition is fused C-terminally to an N-terminal signal sequence appropriate for the expression host system. Signal sequences are typically proteolytically removed from the protein during the translocation and secretion process, generating a defined N-terminus. A wide variety of signal sequences have been described for most expression systems, including bacterial, yeast, insect, and mammalian systems. A non-limiting list of preferred examples for each expression system follows herein. Preferred signal sequences are OmpA, PhoA, and DsbA for E. coli expression. Signal peptides preferred for yeast expression are ppL-alpha, DEX4, invertase signal peptide, acid phosphatase signal peptide, CPY, or INU1. For insect cell expression the preferred signal sequences are sexta adipokinetic hormone precursor, CP1, CP2, CP3, CP4, TPA, PAP, or gp67. For mammalian expression the preferred signal sequences are IL2L, SV40, IgG kappa and IgG lambda.

[0298] In another embodiment, a leader sequence, potentially comprising a well-expressed, independent protein domain, can be fused to the N-terminus of the GLP2-XTEN sequence, separated by a protease cleavage site. While any leader peptide sequence which does not inhibit cleavage at the designed proteolytic site can be used, sequences in preferred embodiments will comprise stable, well-expressed sequences such that expression and folding of the overall composition is not significantly adversely affected, and preferably expression, solubility, and/or folding efficiency are significantly improved. A wide variety of suitable leader sequences have been described in the literature. A non-limiting list of suitable sequences includes maltose binding protein, cellulose binding domain, glutathione S-transferase, 6×His tag (SEQ ID NO: 229), FLAG tag, hemaglutinin tag, and green fluorescent protein. The leader sequence can also be further improved by codon optimization, especially in the second codon position following the ATG start codon, by methods well described in the literature and hereinabove.

[0299] The procedures used to ligate the DNA sequences coding for the GLP2-XTEN, the promoter and optionally the terminator and/or secretory signal sequence, respectively, and to insert them into suitable vectors containing the information necessary for replication, are well known to persons skilled in the art (cf., for instance, Sambrook, J. et al., “Molecular Cloning: A Laboratory Manual,” 3^{rd} edition, Cold Spring Harbor Laboratory Press, 2001).

[0300] In other embodiments, the invention provides constructs and methods of making constructs comprising an polynucleotide sequence optimized for expression that encodes at least about 20 to about 60 amino acids with XTEN characteristics that can be included at the N-terminus of an XTEN carrier encoding sequence (in other words, the polynucleotides encoding the 20-60 encoded optimized amino acids are linked in frame to polynucleotides encoding an XTEN component that is N-terminal to GLP-2) to promote the initiation of translation to allow for expression of XTEN fusions at the N-terminus of proteins without the presence of a helper domain. In an advantage of the foregoing, the sequence does not require subsequent cleavage, thereby reducing the number of steps to manufacture XTEN-containing compositions. As described in more detail in the Examples, the optimized N-terminal sequence has attributes of an unstructured protein, but may include nucleotide bases encoding amino acids selected for their ability to promote initiation of translation and enhanced expression. In one embodiment of the foregoing, the optimized polynucleotide encodes an XTEN sequence with at least about 90% sequence identity compared to AE912. In another embodiment of the foregoing, the optimized polynucleotide encodes an XTEN sequence with at least about 90% sequence identity compared to AM923. In another embodiment of the foregoing, the optimized polynucleotide encodes an XTEN sequence with at least about 90% sequence identity compared to AE48. In another embodiment of the foregoing, the optimized polynucleotide encodes an XTEN sequence with at least about 90% sequence identity compared to AM48. In one embodiment, the optimized polynucleotide NTS comprises a sequence that exhibits at least about 80%, at least about 85%, at least about 90%, at least about 91%, at least about 92%, at least about 93%, at least about 94%, at least about 95%, at least about 96%, at least about 97%, at least about 98%, or at least about 99%, sequence identity compared to a sequence or its complement selected from

AE 48:
(SEQ ID NO: 230)
5′-ATGGCTGAACCTGCTGGCTCTCCAACCTCCACTGAGGAAGGTACCC
CGGGTAGCGGTACTGCTTCTTCCTCTCCAGGTAGCTCTACCCCTTCTGG
TGCAACCGGCTCTCCAGGTGCTTCTCCGGGCACCAGCTCTACCGGTTCT
CCA-3′
and
AM 48:
(SEQ ID NO: 231)
5′-ATGGCTGAACCTGCTGGCTCTCCAACCTCCACTGAGGAAGGTGCAT
CCCCGGGCACCAGCTCTACCGGTTCTCCAGGTAGCTCTACCCCGTCTGG
TGCTACCGGCTCTCCAGGTAGCTCTACCCCGTCTGGTGCTACTGGCTCT
CCA-3′.

[0301] In this manner, a chimeric DNA molecule coding for a monomeric GLP2-XTEN fusion protein is generated. Optionally, this chimeric DNA molecule may be transferred or cloned into another construct that is a more appropriate expression vector. At this point, a host cell capable of expressing the chimeric DNA molecule can be transformed with the chimeric DNA molecule. The vectors containing the DNA segments of interest can be transferred into the host cell by well-known methods, depending on the type of cellular host. For example, calcium chloride transfection is commonly utilized for prokaryotic cells, whereas calcium phosphate treatment, lipofection, or electroporation may be used for other cellular hosts. Other methods used to transform mammalian cells include the use of polybrene, protoplast fusion, liposomes, electroporation, and microinjection. See, generally, Sambrook, et al., supra.

[0302] The transformation may occur with or without the utilization of a carrier, such as an expression vector. Then, the transformed host cell is cultured under conditions suitable for the expression of the chimeric DNA molecule encoding of GLP2-XTEN.

[0303] The present invention also provides a host cell for expressing the monomeric fusion protein compositions disclosed herein. Examples of mammalian cell lines for use in the present invention are the COS-1 (ATCC CRL 1650), COS-7 (ATCC CRL 1651), BHK-21 (ATCC CCL 10)) and BHK-293 (ATCC CRL 1573; Graham et al., J. Gen. Virol. 36:59-72, 1977), BHK-570 cells (ATCC CRL 10314), CHO-K1 (ATCC CCL 61), CHO-S (Invitrogen 11619-012), and 293-F (Invitrogen R790-7). A tk-ts13 BHK cell line is also available from the ATCC under accession number CRL 1632. In addition, a number of other cell lines may be used within the present invention, including Rat Hep I (Rat hepatoma; ATCC CRL 1600), Rat Hep II (Rat hepatoma; ATCC CRL 1548), TCMK (ATCC CCL 139), Human lung (ATCC HB 8065), NCTC 1469 (ATCC CCL 9.1), CHO (ATCC CCL 61) and DUKX cells (Urlaub and Chasin, Proc. Natl. Acad. Sci. USA 77:4216-4220, 1980).

[0304] Examples of suitable yeasts host cells include cells of Saccharomyces spp. or Schizosaccharomyces spp., in particular strains of Saccharomyces cerevisiae or Saccharomyces kluyveri. Other yeasts include Schizosaccharomyces pombe (Beach and Nurse, Nature, 290: 140 [1981]; EP 139,383 published 2 May 1985); Kluyveromyces hosts (U.S. Pat. No. 4,943,529; Fleer et al., Bio/Technology, 9:968-975 (1991)) such as, e.g., K. lactis (MW98-8C, CBS683, CBS4574; Louvencourt et al., J. Bacteriol., 737 [1983]), K. fragilis (ATCC 12,424), K. bulgaricus (ATCC 16,045), K wickeramii (ATCC 24,178), K. waltii (ATCC 56,500), K. drosophilarum (ATCC 36,906; Van den Berg et al., Bio/Technology, 8:135 (1990)), K. thermotolerans, and K. marxianus; yarrowia (EP 402,226); Pichia pastoris (EP 183,070; Sreekrishna et al., J. Basic Microbiol., 28:265-278 [1988]); Candida; Trichoderma reesia (EP 244,234); Neurospora crassa (Case et al., Proc. Natl. Acad. Sci. USA, 76:5259-5263 [1979]); Schwanniomyces such as Schwanniomyces occidentalis (EP 394,538 published 31 Oct. 1990). Methylotropic yeasts are suitable herein and include, but are not limited to, yeast capable of growth on methanol selected from the genera consisting of Hansenula, Candida, Kloeckera, Pichia, Saccharomyces, Torulopsis, and Rhodotorula. Further examples of suitable yeast cells are strains of Kluyveromyces, such as Hansenula, e.g. H. polymorpha, or Pichia, e.g. P. pastoris (cf. Gleeson et al., J. Gen. Microbiol. 132, 1986, pp. 3459-3465; U.S. Pat. No. 4,882,279). A list of specific species that are exemplary of this class of yeasts may be found in C. Anthony, The Biochemistry of Methylotrophs, 269 (1982). Methods for transforming yeast cells with heterologous DNA and producing heterologous polypeptides there from are described, e.g. in U.S. Pat. Nos. 4,599,311, 4,931,373, 4,870,008, 5,037,743, and 4,845,075, all of which are hereby incorporated by reference.

[0305] Examples of other fungal cells are cells of filamentous fungi, e.g. Aspergillus spp., Neurospora spp., Fusarium spp. or Trichoderma spp., in particular strains of A. oryzae, A. nidulans or A. niger. The use of Aspergillus spp. for the expression of proteins is described in, e.g., EP 272 277, EP 238 023, EP 184 438 The transformation of E oxysporum may, for instance, be carried out as described by Malardier et al., 1989, Gene 78: 147-156. The transformation of Trichoderma spp. may be performed for instance as described in EP 244 234.

[0306] Other suitable cells that can be used in the present invention include, but are not limited to, prokaryotic host cells strains such as Escherichia coli, (e.g., strain DH5-α), Bacillus subtilis, Salmonella typhimurium, or strains of the genera of Pseudomonas, Streptomyces and Staphylococcus. Non-limiting examples of suitable prokaryotes include those from the genera: Actinoplanes; Archaeoglobus; Bdellovibrio; Borrelia; Chloroflexus; Enterococcus; Escherichia; Lactobacillus; Listeria; Oceanobacillus; Paracoccus; Pseudomonas; Staphylococcus; Streptococcus; Streptomyces; Thermoplasma; and Vibrio.

[0307] Transformed cells are selected by a phenotype determined by a selectable marker, commonly drug resistance or the ability to grow in the absence of a particular nutrient, e.g. leucine. A preferred vector for use in yeast is the POT1 vector disclosed in U.S. Pat. No. 4,931,373. The DNA sequences encoding the GLP2-XTEN may be preceded by a signal sequence and optionally a leader sequence, e.g. as described above. Methods of transfecting mammalian cells and expressing DNA sequences introduced in the cells are described in e.g., Kaufman and Sharp, J. Mol. Biol. 159 (1982), 601-621; Southern and Berg, J. Mol. Appl. Genet. 1 (1982), 327-341; Loyter et al., Proc. Natl. Acad. Sci. USA 79 (1982), 422-426; Wigler et al., Cell 14 (1978), 725; Corsaro and Pearson, Somatic Cell Genetics 7 (1981), 603, Graham and van der Eb, Virology 52 (1973), 456; and Neumann et al., EMBO J. 1 (1982), 841-845.

[0308] Cloned DNA sequences are introduced into cultured mammalian cells by, for example, calcium phosphate-mediated transfection (Wigler et al., Cell 14:725-732, 1978; Corsaro and Pearson, Somatic Cell Genetics 7:603-616, 1981; Graham and Van der Eb, Virology 52d:456-467, 1973), transfection with many commercially available reagents such as FuGENEG Roche Diagnostics, Mannheim, Germany) or lipofectamine (Invitrogen) or by electroporation (Neumann et al., EMBO J. 1:841-845, 1982). To identify and select cells that express the exogenous DNA, a gene that confers a selectable phenotype (a selectable marker) is generally introduced into cells along with the gene or cDNA of interest. Preferred selectable markers include genes that confer resistance to drugs such as neomycin, hygromycin, puromycin, zeocin, and methotrexate. The selectable marker may be an amplifiable selectable marker. A preferred amplifiable selectable marker is a dihydrofolate reductase (DHFR) sequence. Further examples of selectable markers are well known to one of skill in the art and include reporters such as enhanced green fluorescent protein (EGFP), beta-galactosidase ((3-gal) or chloramphenicol acetyltransferase (CAT). Selectable markers are reviewed by Thilly (Mammalian Cell Technology, Butterworth

[0309] Publishers, Stoneham, Mass., incorporated herein by reference). A person skilled in the art will easily be able to choose suitable selectable markers. Any known selectable marker may be employed so long as it is capable of being expressed simultaneously with the nucleic acid encoding a gene product.

[0310] Selectable markers may be introduced into the cell on a separate plasmid at the same time as the gene of interest, or they may be introduced on the same plasmid. On the same plasmid, the selectable marker and the gene of interest may be under the control of different promoters or the same promoter, the latter arrangement produces a dicistronic message. Constructs of this type are known in the art (for example, Levinson and Simonsen, U.S. Pat. No. 4,713,339). It may also be advantageous to add additional DNA, known as “carrier DNA,” to the mixture that is introduced into the cells.

[0311] After the cells have taken up the DNA, they are grown in an appropriate growth medium, typically 1-2 days, to begin expressing the gene of interest. As used herein the term “appropriate growth medium” means a medium containing nutrients and other components required for the growth of cells and the expression of the GLP2-XTEN of interest. Media generally include a carbon source, a nitrogen source, essential amino acids, essential sugars, vitamins, salts, phospholipids, protein and growth factors. For production of gamma-carboxylated proteins, the medium will contain vitamin K, preferably at a concentration of about 0.1 μg/ml to about 5 μg/ml. Drug selection is then applied to select for the growth of cells that are expressing the selectable marker in a stable fashion. For cells that have been transfected with an amplifiable selectable marker the drug concentration may be increased to select for an increased copy number of the cloned sequences, thereby increasing expression levels. Clones of stably transfected cells are then screened for expression of the GLP-2 polypeptide variant of interest.

[0312] The transformed or transfected host cell is then cultured in a suitable nutrient medium under conditions permitting expression of the GLP2-XTEN fusion protein after which the resulting peptide may be recovered from the culture. The medium used to culture the cells may be any conventional medium suitable for growing the host cells, such as minimal or complex media containing appropriate supplements. Suitable media are available from commercial suppliers or may be prepared according to published recipes (e.g. in catalogues of the American Type Culture Collection). The culture conditions, such as temperature, pH and the like, are those previously used with the host cell selected for expression, and will be apparent to the ordinarily skilled artisan.

[0313] Gene expression may be measured in a sample directly, for example, by conventional Northern blotting to quantitate the transcription of mRNA [Thomas, Proc. Natl. Acad. Sci. USA, 77:5201-5205 (1980)], dot blotting (DNA analysis), or in situ hybridization, using an appropriately labeled probe, based on the sequences provided herein. Alternatively, antibodies may be employed that can recognize specific duplexes, including DNA duplexes, RNA duplexes, and DNA-RNA hybrid duplexes or DNA-protein duplexes. The antibodies in turn may be labeled and the assay may be carried out where the duplex is bound to a surface, so that upon the formation of duplex on the surface, the presence of antibody bound to the duplex can be detected.

[0314] Gene expression, alternatively, may be measured by immunological of fluorescent methods, such as immunohistochemical staining of cells or tissue sections and assay of cell culture or body fluids or the detection of selectable markers, to quantitate directly the expression of gene product. Antibodies useful for immunohistochemical staining and/or assay of sample fluids may be either monoclonal or polyclonal, and may be prepared in any mammal. Conveniently, the antibodies may be prepared against a native sequence GLP-2 polypeptide or against a synthetic peptide based on the DNA sequences provided herein or against exogenous sequence fused to GLP-2 and encoding a specific antibody epitope. Examples of selectable markers are well known to one of skill in the art and include reporters such as enhanced green fluorescent protein (EGFP), beta-galactosidase (β-gal) or chloramphenicol acetyltransferase (CAT).

[0315] Expressed GLP2-XTEN polypeptide product(s) may be purified via methods known in the art or by methods disclosed herein. Procedures such as gel filtration, affinity purification (e.g., using an anti-GLP-2 antibody column), salt fractionation, ion exchange chromatography, size exclusion chromatography, hydroxyapatite adsorption chromatography, hydrophobic interaction chromatography and gel electrophoresis may be used; each tailored to recover and purify the fusion protein produced by the respective host cells. Additional purification may be achieved by conventional chemical purification means, such as high performance liquid chromatography. Some expressed GLP2-XTEN may require refolding during isolation and purification. Methods of purification are described in Robert K. Scopes, Protein Purification: Principles and Practice, Charles R. Castor (ed.), Springer-Verlag 1994, and Sambrook, et al., supra. Multi-step purification separations are also described in Baron, et al., Crit. Rev. Biotechnol. 10:179-90 (1990) and Below, et al., J. Chromatogr. A. 679:67-83 (1994). For therapeutic purposes it is preferred that the GLP2-XTEN fusion proteins of the invention are substantially pure. Thus, in a preferred embodiment of the invention the GLP2-XTEN of the invention is purified to at least about 90 to 95% homogeneity, preferably to at least about 98% homogeneity. Purity may be assessed by, e.g., gel electrophoresis, HPLC, and amino-terminal amino acid sequencing.

### VIII). Pharmaceutical Compositions

[0316] The present invention provides pharmaceutical compositions comprising GLP2-XTEN. In one embodiment, the pharmaceutical composition comprises a GLP2-XTEN fusion protein disclosed herein and at least one pharmaceutically acceptable carrier. GLP2-XTEN polypeptides of the present invention can be formulated according to known methods to prepare pharmaceutically useful compositions, whereby the polypeptide is combined in admixture with a pharmaceutically acceptable carrier vehicle, such as aqueous solutions, buffers, solvents and/or pharmaceutically acceptable suspensions, emulsions, stabilizers or excipients. Examples of non-aqueous solvents include propylethylene glycol, polyethylene glycol and vegetable oils. Formulations of the pharmaceutical compositions are prepared for storage by mixing the active GLP2-XTEN ingredient having the desired degree of purity with optional physiologically acceptable carriers, excipients (e.g., sodium chloride, a calcium salt, sucrose, or polysorbate) or stabilizers (e.g., sucrose, trehalose, raffinose, arginine, a calcium salt, glycine or histidine), as described in Remington's Pharmaceutical Sciences 16th edition, Osol, A. Ed. (1980), in the form of lyophilized formulations or aqueous solutions.

[0317] In one embodiment, the pharmaceutical composition may be supplied as a lyophilized powder to be reconstituted prior to administration. In another embodiment, the pharmaceutical composition may be supplied in a liquid form, which can be administered directly to a patient. In another embodiment, the composition is supplied as a liquid in a pre-filled syringe for administration of the composition. In another embodiment, the composition is supplied as a liquid in a pre-filled vial that can be incorporated into a pump.

[0318] The pharmaceutical compositions can be administered by any suitable means or route, including subcutaneously, subcutaneously by infusion pump, intramuscularly, intravenously, or via the pulmonary route. It will be appreciated that the preferred route will vary with the disease and age of the recipient, and the severity of the condition being treated.

[0319] In one embodiment, the GLP2-XTEN pharmaceutical composition in liquid form or after reconstitution (when supplied as a lyophilized powder) comprises GLP-2 linked to XTEN, which composition is capable of increasing GLP-2-related activity to at least 10% of the normal GLP-2 plasma level in the blood for at least about 72 hours, or at least about 96 hours, or at least about 120 hours, or at least about 7 days, or at least about 10 days, or at least about 14 days, or at least about 21 days after administration of the GLP-2 pharmaceutical composition to a subject in need. In another embodiment, the GLP2-XTEN pharmaceutical composition in liquid form or after reconstitution (when supplied as a lyophilized powder) and administration to a subject is capable of increasing GLP2-XTEN concentrations to at least 500 ng/ml, or at least 1000 ng/ml, or at least about 2000 ng/ml, or at least about 3000 ng/ml, or at least about 4000 ng/ml, or at least about 5000 ng/ml, or at least about 10000 ng/ml, or at least about 15000 ng/ml, or at least about 20000 ng/ml, or at least about 30000 ng/ml, or at least about 40000 ng/ml for at least about 24 hours, or at least about 48 hours, or at least about 72 hours, or at least about 96 hours, or at least about 120 hours, or at least about 144 hours after administration of the GLP-2 pharmaceutical composition to a subject in need. It is specifically contemplated that the pharmaceutical compositions of the foregoing embodiments in this paragraph can be formulated to include one or more excipients, buffers or other ingredients known in the art to be compatible with administration by the intravenous route or the subcutaneous route or the intramuscular route. Thus, in the embodiments hereinabove described in this paragraph, the pharmaceutical composition is administered subcutaneously, intramuscularly, or intravenously.

[0320] The compositions of the invention may be formulated using a variety of excipients. Suitable excipients include microcrystalline cellulose (e.g. Avicel PH102, Avicel PH101), polymethacrylate, poly(ethyl acrylate, methyl methacrylate, trimethylammonioethyl methacrylate chloride) (such as Eudragit RS-30D), hydroxypropyl methylcellulose (Methocel K100M, Premium CR Methocel K100M, Methocel E5, Opadry®), magnesium stearate, talc, triethyl citrate, aqueous ethylcellulose dispersion (Surelease®), and protamine sulfate. The slow release agent may also comprise a carrier, which can comprise, for example, solvents, dispersion media, coatings, antibacterial and antifungal agents, isotonic and absorption delaying agents. Pharmaceutically acceptable salts can also be used in these slow release agents, for example, mineral salts such as hydrochlorides, hydrobromides, phosphates, or sulfates, as well as the salts of organic acids such as acetates, proprionates, malonates, or benzoates. The composition may also contain liquids, such as water, saline, glycerol, and ethanol, as well as substances such as wetting agents, emulsifying agents, or pH buffering agents. Liposomes may also be used as a carrier.

[0321] In another embodiment, the compositions of the present invention are encapsulated in liposomes, which have demonstrated utility in delivering beneficial active agents in a controlled manner over prolonged periods of time. Liposomes are closed bilayer membranes containing an entrapped aqueous volume. Liposomes may also be unilamellar vesicles possessing a single membrane bilayer or multilamellar vesicles with multiple membrane bilayers, each separated from the next by an aqueous layer. The structure of the resulting membrane bilayer is such that the hydrophobic (non-polar) tails of the lipid are oriented toward the center of the bilayer while the hydrophilic (polar) heads orient towards the aqueous phase. In one embodiment, the liposome may be coated with a flexible water soluble polymer that avoids uptake by the organs of the mononuclear phagocyte system, primarily the liver and spleen. Suitable hydrophilic polymers for surrounding the liposomes include, without limitation, PEG, polyvinylpyrrolidone, polyvinylmethylether, polymethyloxazoline, polyethyloxazoline, polyhydroxypropyloxazoline, polyhydroxypropylmethacrylamide, polymethacrylamide, polydimethylacrylamide, polyhydroxypropylmethacrylate, polyhydroxethylacrylate, hydroxymethylcellulose hydroxyethylcellulose, polyethyleneglycol, polyaspartamide and hydrophilic peptide sequences as described in U.S. Pat. Nos. 6,316,024; 6,126,966; 6,056,973; 6,043,094, the contents of which are incorporated by reference in their entirety.

[0322] Liposomes may be comprised of any lipid or lipid combination known in the art. For example, the vesicle-forming lipids may be naturally-occurring or synthetic lipids, including phospholipids, such as phosphatidylcholine, phosphatidylethanolamine, phosphatidic acid, phosphatidylserine, phasphatidylglycerol, phosphatidylinositol, and sphingomyelin as disclosed in U.S. Pat. Nos. 6,056,973 and 5,874,104. The vesicle-forming lipids may also be glycolipids, cerebrosides, or cationic lipids, such as 1,2-dioleyloxy-3-(trimethylamino) propane (DOTAP); N-[1-(2,3,-ditetradecyloxy)propyl]-N,N-dimethyl-N-hydroxyethylammonium bromide (DMRIE); N-[1-(2,3,-dioleyloxy)propyl]-N,N-dimethyl-N-hydroxy ethylammonium bromide (DORIE); N-[1-(2,3-dioleyloxy)propyl]-N,N,N-trimethylammonium chloride (DOTMA); 3 [N—(N′,N′-dimethylaminoethane) carbamoly] cholesterol (DC-Chol); or dimethyldioctadecylammonium (DDAB) also as disclosed in U.S. Pat. No. 6,056,973. Cholesterol may also be present in the proper range to impart stability to the vesicle as disclosed in U.S. Pat. Nos. 5,916,588 and 5,874,104.

[0323] Additional liposomal technologies are described in U.S. Pat. Nos. 6,759,057; 6,406,713; 6,352,716; 6,316,024; 6,294,191; 6,126,966; 6,056,973; 6,043,094; 5,965,156; 5,916,588; 5,874,104; 5,215,680; and 4,684,479, the contents of which are incorporated herein by reference. These describe liposomes and lipid-coated microbubbles, and methods for their manufacture. Thus, one skilled in the art, considering both the disclosure of this invention and the disclosures of these other patents could produce a liposome for the extended release of the polypeptides of the present invention.

[0324] For liquid formulations, a desired property is that the formulation be supplied in a form that can pass through a 25, 28, 30, 31, 32 gauge needle for intravenous, intramuscular, intraarticular, or subcutaneous administration. In another embodiment, a desired property is that the formulation be supplied in a form that can be nebulized into an aerosal of suitable particle size for inhalation therapy.

[0325] Osmotic pumps may be used as slow release agents in the form of tablets, pills, capsules or implantable devices. Osmotic pumps are well known in the art and readily available to one of ordinary skill in the art from companies experienced in providing osmotic pumps for extended release drug delivery. Examples are ALZA's DUROS™; ALZA's OROS™; Osmotica Pharmaceutical's Osmodex™ system; Shire Laboratories' EnSoTrol™ system; and Alzet™. Patents that describe osmotic pump technology are U.S. Pat. Nos. 6,890,918; 6,838,093; 6,814,979; 6,713,086; 6,534,090; 6,514,532; 6,361,796; 6,352,721; 6,294,201; 6,284,276; 6,110,498; 5,573,776; 4,200,0984; and 4,088,864, the contents of which are incorporated herein by reference. One skilled in the art, considering both the disclosure of this invention and the disclosures of these other patents could produce an osmotic pump for the extended release of the polypeptides of the present invention.

[0326] Syringe pumps may also be used as slow release agents. Such devices are described in U.S. Pat. Nos. 4,976,696; 4,933,185; 5,017,378; 6,309,370; 6,254,573; 4,435,173; 4,398,908; 6,572,585; 5,298,022; 5,176,502; 5,492,534; 5,318,540; and 4,988,337, the contents of which are incorporated herein by reference. One skilled in the art, considering both the disclosure of this invention and the disclosures of these other patents could produce a syringe pump for the extended release of the compositions of the present invention.

### IX). Pharmaceutical Kits

[0327] In another aspect, the invention provides a kit to facilitate the use of the GLP2-XTEN polypeptides. The kit comprises the pharmaceutical composition provided herein, a label identifying the pharmaceutical composition, and an instruction for storage, reconstitution and/or administration of the pharmaceutical compositions to a subject. In some embodiment, the kit comprises, preferably: (a) an amount of a GLP2-XTEN fusion protein composition sufficient to treat a gastrointestinal condition upon administration to a subject in need thereof; (b) an amount of a pharmaceutically acceptable carrier; and (c) together in a formulation ready for injection or for reconstitution with sterile water, buffer, or dextrose; together with a label identifying the GLP2-XTEN drug and storage and handling conditions, and a sheet of the approved indications for the drug, instructions for the reconstitution and/or administration of the GLP2-XTEN drug for the use for the prevention and/or treatment of an approved indication, appropriate dosage and safety information, and information identifying the lot and expiration of the drug. In another embodiment of the foregoing, the kit can comprise a second container that can carry a suitable diluent for the GLP2-XTEN composition, the use of which will provide the user with the appropriate concentration of GLP2-XTEN to be delivered to the subject.

### EXAMPLES

### Example 1: Construction of XTEN_AD36 Motif Segments

[0328] The following example describes the construction of a collection of codon-optimized genes encoding motif sequences of 36 amino acids. As a first step, a stuffer vector pCW0359 was constructed based on a pET vector and that includes a T7 promoter. pCW0359 encodes a cellulose binding domain (CBD) and a TEV protease recognition site followed by a stuffer sequence that is flanked by BsaI, BbsI, and KpnI sites. The BsaI and BbsI sites were inserted such that they generate compatible overhangs after digestion. The stuffer sequence is followed by a truncated version of the GFP gene and a His tag. The stuffer sequence contains stop codons and thus E. coli cells carrying the stuffer plasmid pCW0359 form non-fluorescent colonies. The stuffer vector pCW0359 was digested with BsaI and KpnI to remove the stuffer segment and the resulting vector fragment was isolated by agarose gel purification. The sequences were designated XTEN_AD36, reflecting the AD family of motifs. Its segments have the amino acid sequence [X]3 where X is a 12mer peptide with the sequences: GESPGGSSGSES (SEQ ID NO: 232), GSEGSSGPGESS (SEQ ID NO: 233), GSSESGSSEGGP (SEQ ID NO: 234), or GSGGEPSESGSS (SEQ ID NO: 235). The insert was obtained by annealing the following pairs of phosphorylated synthetic oligonucleotide pairs:

AD1for:
(SEQ ID NO: 236)
AGGTGAATCTCCDGGTGGYTCYAGCGGTTCYGARTC
AD1rev:
(SEQ ID NO: 237)
ACCTGAYTCRGAACCGCTRGARCCACCHGGAGATTC
AD2for:
(SEQ ID NO: 238)
AGGTAGCGAAGGTTCTTCYGGTCCDGGYGARTCYTC
AD2rev:
(SEQ ID NO: 239)
ACCTGARGAYTCRCCHGGACCRGAAGAACCTTCGCT
AD3for:
(SEQ ID NO: 240)
AGGTTCYTCYGAAAGCGGTTCTTCYGARGGYGGTCC
AD3rev:
(SEQ ID NO: 241)
ACCTGGACCRCCYTCRGAAGAACCGCTTTCRGARGA
AD4for:
(SEQ ID NO: 242)
AGGTTCYGGTGGYGAACCDTCYGARTCTGGTAGCTC

[0329] We also annealed the phosphorylated oligonucleotide 3KpnIstopperFor: AGGTTCGTCTTCACTCGAGGGTAC (SEQ ID NO: 243) and the non-phosphorylated oligonucleotide pr_3 KpnIstopperRev: CCTCGAGTGAAGACGA (SEQ ID NO: 244). The annealed oligonucleotide pairs were ligated, which resulted in a mixture of products with varying length that represents the varying number of 12mer repeats ligated to one BbsI/KpnI segment. The products corresponding to the length of 36 amino acids were isolated from the mixture by preparative agarose gel electrophoresis and ligated into the BsaI/KpnI digested stuffer vector pCW0359. Most of the clones in the resulting library designated LCW0401 showed green fluorescence after induction, which shows that the sequence of XTEN_AD36 had been ligated in frame with the GFP gene and that most sequences of XTEN_AD36 had good expression levels.

[0330] We screened 96 isolates from library LCW0401 for high level of fluorescence by stamping them onto agar plate containing IPTG. The same isolates were evaluated by PCR and 48 isolates were identified that contained segments with 36 amino acids as well as strong fluorescence. These isolates were sequenced and 39 clones were identified that contained correct XTEN_AD36 segments. The file names of the nucleotide and amino acid constructs for these segments are listed in Table 8.

TABLE 8
DNA and Amino Acid Sequences for 36-mer motifs (SEQ ID NOS 245-320, respectively,
in order of appearance)

| File name | Amino acid sequence | Nucleotide sequence |
|---|---|---|
| LCW0401_001_ | GSGGEPSESGSSGESPGG | GGTTCTGGTGGCGAACCGTCCGAGTCTGGTAGC |
| GFP-N_A01.ab1 | SSGSESGESPGGSSGSES | TCAGGTGAATCTCCGGGTGGCTCTAGCGGTTCC |
| | | GAGTCAGGTGAATCTCCTGGTGGTTCCAGCGGT |
| | | TCCGAGTCA |
| LCW0401_002_ | GSEGSSGPGESSGESPGG | GGTAGCGAAGGTTCTTCTGGTCCTGGCGAGTCT |
| GFP-N_B01.ab1 | SSGSESGSSESGSSEGGP | TCAGGTGAATCTCCTGGTGGTTCCAGCGGTTCT |
| | | GAATCAGGTTCCTCCGAAAGCGGTTCTTCCGAG |
| | | GGCGGTCCA |
| LCW0401_003_ | GSSESGSSEGGPGSSESG | GGTTCCTCTGAAAGCGGTTCTTCCGAAGGTGGT |
| GFP-N_C01.ab1 | SSEGGPGESPGGSSGSES | CCAGGTTCCTCTGAAAGCGGTTCTTCTGAGGGT |
| | | GGTCCAGGTGAATCTCCGGGTGGCTCCAGCGGT |
| | | TCCGAGTCA |
| LCW0401_004_ | GSGGEPSESGSSGSSESG | GGTTCCGGTGGCGAACCGTCTGAATCTGGTAGC |
| GFP-N_D01.ab1 | SSEGGPGSGGEPSESGSS | TCAGGTTCTTCTGAAAGCGGTTCTTCCGAGGGT |
| | | GGTCCAGGTTCTGGTGGTGAACCTTCCGAGTCT |
| | | GGTAGCTCA |
| LCW0401_007_ | GSSESGSSEGGPGSEGSS | GGTTCTTCCGAAAGCGGTTCTTCTGAGGGTGGT |
| GFP-N_F01.ab1 | GPGESSGSEGSSGPGESS | CCAGGTAGCGAAGGTTCTTCCGGTCCAGGTGAG |
| | | TCTTCAGGTAGCGAAGGTTCTTCTGGTCCTGGT |
| | | GAATCTTCA |
| LCW0401_008_ | GSSESGSSEGGPGESPGG | GGTTCCTCTGAAAGCGGTTCTTCCGAGGGTGGT |
| GFP-N_G01.ab1 | SSGSESGSEGSSGPGESS | CCAGGTGAATCTCCAGGTGGTTCCAGCGGTTCT |
| | | GAGTCAGGTAGCGAAGGTTCTTCTGGTCCAGGT |
| | | GAATCCTCA |
| LCW0401_012_ | GSGGEPSESGSSGSGGEP | GGTTCTGGTGGTGAACCGTCTGAGTCTGGTAGC |
| GFP-N_H01.ab1 | SESGSSGSEGSSGPGESS | TCAGGTTCCGGTGGCGAACCATCCGAATCTGGT |
| | | AGCTCAGGTAGCGAAGGTTCTTCCGGTCCAGGT |
| | | GAGTCTTCA |
| LCW0401_015_ | GSSESGSSEGGPGSEGSS | GGTTCTTCCGAAAGCGGTTCTTCCGAAGGCGGT |
| GFP-N_A02.ab1 | GPGESSGESPGGSSGSES | CCAGGTAGCGAAGGTTCTTCTGGTCCAGGCGAA |
| | | TCTTCAGGTGAATCTCCTGGTGGCTCCAGCGGT |
| | | TCTGAGTCA |
| LCW0401_016_ | GSSESGSSEGGPGSSESG | GGTTCCTCCGAAAGCGGTTCTTCTGAGGGCGGT |
| GFP-N_B02.ab1 | SSEGGPGSSESGSSEGGP | CCAGGTTCCTCCGAAAGCGGTTCTTCCGAGGGC |
| | | GGTCCAGGTTCTTCTGAAAGCGGTTCTTCCGAG |
| | | GGCGGTCCA |
| LCW0401_020_ | GSGGEPSESGSSGSEGSS | GGTTCCGGTGGCGAACCGTCCGAATCTGGTAGC |
| GFP-N_E02.ab1 | GPGESSGSSESGSSEGGP | TCAGGTAGCGAAGGTTCTTCTGGTCCAGGCGAA |
| | | TCTTCAGGTTCCTCTGAAAGCGGTTCTTCTGAG |
| | | GGCGGTCCA |
| LCW0401_022_ | GSGGEPSESGSSGSSESG | GGTTCTGGTGGTGAACCGTCCGAATCTGGTAGC |
| GFP-N_F02.ab1 | SSEGGPGSGGEPSESGSS | TCAGGTTCTTCCGAAAGCGGTTCTTCTGAAGGT |
| | | GGTCCAGGTTCCGGTGGCGAACCTTCTGAATCT |
| | | GGTAGCTCA |
| LCW0401_024_ | GSGGEPSESGSSGSSESG | GGTTCTGGTGGCGAACCGTCCGAATCTGGTAGC |
| GFP-N_G02.ab1 | SSEGGPGESPGGSSGSES | TCAGGTTCCTCCGAAAGCGGTTCTTCTGAAGGT |
| | | GGTCCAGGTGAATCTCCAGGTGGTTCTAGCGGT |
| | | TCTGAATCA |
| LCW0401_026_ | GSGGEPSESGSSGESPGG | GGTTCTGGTGGCGAACCGTCTGAGTCTGGTAGC |
| GFP-N_H02.ab1 | SSGSESGSEGSSGPGESS | TCAGGTGAATCTCCTGGTGGCTCCAGCGGTTCT |
| | | GAATCAGGTAGCGAAGGTTCTTCTGGTCCTGGT |
| | | GAATCTTCA |
| LCW0401_027_ | GSGGEPSESGSSGESPGG | GGTTCCGGTGGCGAACCTTCCGAATCTGGTAGC |
| GFP-N_A03.ab1 | SSGSESGSGGEPSESGSS | TCAGGTGAATCTCCGGGTGGTTCTAGCGGTTCT |
| | | GAGTCAGGTTCTGGTGGTGAACCTTCCGAGTCT |
| | | GGTAGCTCA |
| LCW0401_028_ | GSSESGSSEGGPGSSESG | GGTTCCTCTGAAAGCGGTTCTTCTGAGGGCGGT |
| GFP-N_B03.ab1 | SSEGGPGSSESGSSEGGP | CCAGGTTCTTCCGAAAGCGGTTCTTCCGAGGGC |
| | | GGTCCAGGTTCTTCCGAAAGCGGTTCTTCTGAA |
| | | GGCGGTCCA |
| LCW0401_030_ | GESPGGSSGSESGSEGSS | GGTGAATCTCCGGGTGGCTCCAGCGGTTCTGAG |
| GFP-N_C03.ab1 | GPGESSGSEGSSGPGESS | TCAGGTAGCGAAGGTTCTTCCGGTCCGGGTGAG |
| | | TCCTCAGGTAGCGAAGGTTCTTCCGGTCCTGGT |
| | | GAGTCTTCA |
| LCW0401_031_ | GSGGEPSESGSSGSGGEP | GGTTCTGGTGGCGAACCTTCCGAATCTGGTAGC |
| GFP-N_D03.ab1 | SESGSSGSSESGSSEGGP | TCAGGTTCCGGTGGTGAACCTTCTGAATCTGGT |
| | | AGCTCAGGTTCTTCTGAAAGCGGTTCTTCCGAG |
| | | GGCGGTCCA |
| LCW0401_033_ | GSGGEPSESGSSGSGGEP | GGTTCCGGTGGTGAACCTTCTGAATCTGGTAGC |
| GFP-N_E03.ab1 | SESGSSGSGGEPSESGSS | TCAGGTTCCGGTGGCGAACCATCCGAGTCTGGT |
| | | AGCTCAGGTTCCGGTGGTGAACCATCCGAGTCT |
| | | GGTAGCTCA |
| LCW0401_037_ | GSGGEPSESGSSGSSESG | GGTTCCGGTGGCGAACCTTCTGAATCTGGTAGC |
| GFP-N_F03.ab1 | SSEGGPGSEGSSGPGESS | TCAGGTTCCTCCGAAAGCGGTTCTTCTGAGGGC |
| | | GGTCCAGGTAGCGAAGGTTCTTCTGGTCCGGGC |
| | | GAGTCTTCA |
| LCW0401_038_ | GSGGEPSESGSSGSEGSS | GGTTCCGGTGGTGAACCGTCCGAGTCTGGTAGC |
| GFP-N_G03.ab1 | GPGESSGSGGEPSESGSS | TCAGGTAGCGAAGGTTCTTCTGGTCCGGGTGAG |
| | | TCTTCAGGTTCTGGTGGCGAACCGTCCGAATCT |
| | | GGTAGCTCA |
| LCW0401_039_ | GSGGEPSESGSSGESPGG | GGTTCTGGTGGCGAACCGTCCGAATCTGGTAGC |
| GFP-N_H03.ab1 | SSGSESGSGGEPSESGSS | TCAGGTGAATCTCCTGGTGGTTCCAGCGGTTCC |
| | | GAGTCAGGTTCTGGTGGCGAACCTTCCGAATCT |
| | | GGTAGCTCA |
| LCW0401_040_ | GSSESGSSEGGPGSGGEP | GGTTCTTCCGAAAGCGGTTCTTCCGAGGGCGGT |
| GFP-N_A04.ab1 | SESGSSGSSESGSSEGGP | CCAGGTTCCGGTGGTGAACCATCTGAATCTGGT |
| | | AGCTCAGGTTCTTCTGAAAGCGGTTCTTCTGAA |
| | | GGTGGTCCA |
| LCW0401_042_ | GSEGSSGPGESSGESPGG | GGTAGCGAAGGTTCTTCCGGTCCTGGTGAGTCT |
| GFP-N_C04.ab1 | SSGSESGSEGSSGPGESS | TCAGGTGAATCTCCAGGTGGCTCTAGCGGTTCC |
| | | GAGTCAGGTAGCGAAGGTTCTTCTGGTCCTGGC |
| | | GAGTCCTCA |
| LCW0401_046_ | GSSESGSSEGGPGSSESG | GGTTCCTCTGAAAGCGGTTCTTCCGAAGGCGGT |
| GFP-N_D04.ab1 | SSEGGPGSSESGSSEGGP | CCAGGTTCTTCCGAAAGCGGTTCTTCTGAGGGC |
| | | GGTCCAGGTTCCTCCGAAAGCGGTTCTTCTGAG |
| | | GGTGGTCCA |
| LCW0401_047_ | GSGGEPSESGSSGESPGG | GGTTCTGGTGGCGAACCTTCCGAGTCTGGTAGC |
| GFP-N_E04.ab1 | SSGSESGESPGGSSGSES | TCAGGTGAATCTCCGGGTGGTTCTAGCGGTTCC |
| | | GAGTCAGGTGAATCTCCGGGTGGTTCCAGCGGT |
| | | TCTGAGTCA |
| LCW0401_051_ | GSGGEPSESGSSGSEGSS | GGTTCTGGTGGCGAACCATCTGAGTCTGGTAGC |
| GFP-N_F04.ab1 | GPGESSGESPGGSSGSES | TCAGGTAGCGAAGGTTCTTCCGGTCCAGGCGAG |
| | | TCTTCAGGTGAATCTCCTGGTGGCTCCAGCGGT |
| | | TCTGAGTCA |
| LCW0401_053_ | GESPGGSSGSESGESPGG | GGTGAATCTCCTGGTGGTTCCAGCGGTTCCGAG |
| GFP-N_H04.ab1 | SSGSESGESPGGSSGSES | TCAGGTGAATCTCCAGGTGGCTCTAGCGGTTCC |
| | | GAGTCAGGTGAATCTCCTGGTGGTTCTAGCGGT |
| | | TCTGAATCA |
| LCW0401_054_ | GSEGSSGPGESSGSEGSS | GGTAGCGAAGGTTCTTCCGGTCCAGGTGAATCT |
| GFP-N_A05.ab1 | GPGESSGSGGEPSESGSS | TCAGGTAGCGAAGGTTCTTCTGGTCCTGGTGAA |
| | | TCCTCAGGTTCCGGTGGCGAACCATCTGAATCT |
| | | GGTAGCTCA |
| LCW0401_059_ | GSGGEPSESGSSGSEGSS | GGTTCTGGTGGCGAACCATCCGAATCTGGTAGC |
| GFP-N_D05.ab1 | GPGESSGESPGGSSGSES | TCAGGTAGCGAAGGTTCTTCTGGTCCTGGCGAA |
| | | TCTTCAGGTGAATCTCCAGGTGGCTCTAGCGGT |
| | | TCCGAATCA |
| LCW0401_060_ | GSGGEPSESGSSGSSESG | GGTTCCGGTGGTGAACCGTCCGAATCTGGTAGC |
| GFP-N_E05.ab1 | SSEGGPGSGGEPSESGSS | TCAGGTTCCTCTGAAAGCGGTTCTTCCGAGGGT |
| | | GGTCCAGGTTCCGGTGGTGAACCTTCTGAGTCT |
| | | GGTAGCTCA |
| LCW0401_061_ | GSSESGSSEGGPGSGGEP | GGTTCCTCTGAAAGCGGTTCTTCTGAGGGCGGT |
| GFP-N_F05.ab1 | SESGSSGSEGSSGPGESS | CCAGGTTCTGGTGGCGAACCATCTGAATCTGGT |
| | | AGCTCAGGTAGCGAAGGTTCTTCCGGTCCGGGT |
| | | GAATCTTCA |
| LCW0401_063_ | GSGGEPSESGSSGSEGSS | GGTTCTGGTGGTGAACCGTCCGAATCTGGTAGC |
| GFP-N_H05.ab1 | GPGESSGSEGSSGPGESS | TCAGGTAGCGAAGGTTCTTCTGGTCCTGGCGAG |
| | | TCTTCAGGTAGCGAAGGTTCTTCTGGTCCTGGT |
| | | GAATCTTCA |
| LCW0401_066_ | GSGGEPSESGSSGSSESG | GGTTCTGGTGGCGAACCATCCGAGTCTGGTAGC |
| GFP-N_B06.ab1 | SSEGGPGSGGEPSESGSS | TCAGGTTCTTCCGAAAGCGGTTCTTCCGAAGGC |
| | | GGTCCAGGTTCTGGTGGTGAACCGTCCGAATCT |
| | | GGTAGCTCA |
| LCW0401_067_ | GSGGEPSESGSSGESPGG | GGTTCCGGTGGCGAACCTTCCGAATCTGGTAGC |
| GFP-N_C06.ab1 | SSGSESGESPGGSSGSES | TCAGGTGAATCTCCGGGTGGTTCTAGCGGTTCC |
| | | GAATCAGGTGAATCTCCAGGTGGTTCTAGCGGT |
| | | TCCGAATCA |
| LCW0401_069_ | GSGGEPSESGSSGSGGEP | GGTTCCGGTGGTGAACCATCTGAGTCTGGTAGC |
| GFP-N_D06.ab1 | SESGSSGESPGGSSGSES | TCAGGTTCCGGTGGCGAACCGTCCGAGTCTGGT |
| | | AGCTCAGGTGAATCTCCGGGTGGTTCCAGCGGT |
| | | TCCGAATCA |
| LCW0401_070_ | GSEGSSGPGESSGSSESG | GGTAGCGAAGGTTCTTCTGGTCCGGGCGAATCC |
| GFP-N_E06.ab1 | SSEGGPGSEGSSGPGESS | TCAGGTTCCTCCGAAAGCGGTTCTTCCGAAGGT |
| | | GGTCCAGGTAGCGAAGGTTCTTCCGGTCCTGGT |
| | | GAATCTTCA |
| LCW0401_078_ | GSSESGSSEGGPGESPGG | GGTTCCTCTGAAAGCGGTTCTTCTGAAGGCGGT |
| GFP-N_F06.ab1 | SSGSESGESPGGSSGSES | CCAGGTGAATCTCCGGGTGGCTCCAGCGGTTCT |
| | | GAATCAGGTGAATCTCCTGGTGGCTCCAGCGGT |
| | | TCCGAGTCA |
| LCW0401_079_ | GSEGSSGPGESSGSEGSS | GGTAGCGAAGGTTCTTCTGGTCCAGGCGAGTCT |
| GFP-N_G06.ab1 | GPGESSGSGGEPSESGSS | TCAGGTAGCGAAGGTTCTTCCGGTCCTGGCGAG |
| | | TCTTCAGGTTCCGGTGGCGAACCGTCCGAATCT |
| | | GGTAGCTCA |

### Example 2: Construction of XTEN_AE36 Segments

[0331] A codon library encoding XTEN sequences of 36 amino acid length was constructed. The XTEN sequence was designated XTEN_AE36. Its segments have the amino acid sequence [X]₃ where X is a 12mer peptide with the sequence: GSPAGSPTSTEE (SEQ ID NO: 321), GSEPATSGSE TP (SEQ ID NO: 322), GTSESA TPESGP (SEQ ID NO: 323), or GTSTEPSEGSAP (SEQ ID NO: 324). The insert was obtained by annealing the following pairs of phosphorylated synthetic oligonucleotide pairs:

AE1for:
(SEQ ID NO: 325)
AGGTAGCCCDGCWGGYTCTCCDACYTCYACYGARGA
AE1rev:
(SEQ ID NO: 326)
ACCTTCYTCRGTRGARGTHGGAGARCCWGCHGGGCT
AE2for:
(SEQ ID NO: 327)
AGGTAGCGAACCKGCWACYTCYGGYTCTGARACYCC
AE2rev:
(SEQ ID NO: 328)
ACCTGGRGTYTCAGARCCRGARGTWGCMGGTTCGCT
AE3for:
(SEQ ID NO: 329)
AGGTACYTCTGAAAGCGCWACYCCKGARTCYGGYCC
AE3rev:
(SEQ ID NO: 330)
ACCTGGRCCRGAYTCMGGRGTWGCGCTTTCAGARGT
AE4for:
(SEQ ID NO: 331)
AGGTACYTCTACYGAACCKTCYGARGGYAGCGCWCC
AE4rev:
(SEQ ID NO: 332)
ACCTGGWGCGCTRCCYTCRGAMGGTTCRGTAGARGT

[0332] We also annealed the phosphorylated oligonucleotide 3KpnIstopperFor: AGGTTCGTCTTCACTCGAGGGTAC (SEQ ID NO: 243) and the non-phosphorylated oligonucleotide pr_3 KpnIstopperRev: CCTCGAGTGAAGACGA (SEQ ID NO: 244). The annealed oligonucleotide pairs were ligated, which resulted in a mixture of products with varying length that represents the varying number of 12mer repeats ligated to one BbsI/KpnI segment. The products corresponding to the length of 36 amino acids were isolated from the mixture by preparative agarose gel electrophoresis and ligated into the BsaI/KpnI digested stuffer vector pCW0359. Most of the clones in the resulting library designated LCW0402 showed green fluorescence after induction which shows that the sequence of XTEN_AE36 had been ligated in frame with the GFP gene and most sequences of XTEN_AE36 show good expression.

[0333] We screened 96 isolates from library LCW0402 for high level of fluorescence by stamping them onto agar plate containing IPTG. The same isolates were evaluated by PCR and 48 isolates were identified that contained segments with 36 amino acids as well as strong fluorescence. These isolates were sequenced and 37 clones were identified that contained correct XTEN_AE36 segments. The file names of the nucleotide and amino acid constructs for these segments are listed in Table 9.

TABLE 9
DNA and Amino Acid Sequences for 36-mer motifs (SEQ ID NOS 333-406,
respectively, in order of appearance)

| File name | Amino acid sequence | Nucleotide sequence |
|---|---|---|
| LCW0402_002_ | GSPAGSPTSTEEGTSE | GGTAGCCCGGCAGGCTCTCCGACCTCTACTGAGGAA |
| GFP-N_A07.ab1 | SATPESGPGTSTEPSE | GGTACTTCTGAAAGCGCAACCCCGGAGTCCGGCCCA |
| | GSAP | GGTACCTCTACCGAACCGTCTGAGGGCAGCGCACCA |
| LCW0402_003_ | GTSTEPSEGSAPGTST | GGTACTTCTACCGAACCGTCCGAAGGCAGCGCTCCA |
| GFP-N_B07.ab1 | EPSEGSAPGTSTEPSE | GGTACCTCTACTGAACCTTCCGAGGGCAGCGCTCCA |
| | GSAP | GGTACCTCTACCGAACCTTCTGAAGGTAGCGCACCA |
| LCW0402_004_ | GTSTEPSEGSAPGTSE | GGTACCTCTACCGAACCGTCTGAAGGTAGCGCACCA |
| GFP-N_C07.ab1 | SATPESGPGTSESATP | GGTACCTCTGAAAGCGCAACTCCTGAGTCCGGTCCA |
| | ESGP | GGTACTTCTGAAAGCGCAACCCCGGAGTCTGGCCCA |
| LCW0402_005_ | GTSTEPSEGSAPGTSE | GGTACTTCTACTGAACCGTCTGAAGGTAGCGCACCA |
| GFP-N_D07.ab1 | SATPESGPGTSESATP | GGTACTTCTGAAAGCGCAACCCCGGAATCCGGCCCA |
| | ESGP | GGTACCTCTGAAAGCGCAACCCCGGAGTCCGGCCCA |
| LCW0402_006_ | GSEPATSGSETPGTSE | GGTAGCGAACCGGCAACCTCCGGCTCTGAAACCCCA |
| GFP-N_E07.ab1 | SATPESGPGSPAGSPT | GGTACCTCTGAAAGCGCTACTCCTGAATCCGGCCCA |
| | STEE | GGTAGCCCGGCAGGTTCTCCGACTTCCACTGAGGAA |
| LCW0402_008_ | GTSESATPESGPGSEP | GGTACTTCTGAAAGCGCAACCCCTGAATCCGGTCCA |
| GFP-N_F07.ab1 | ATSGSETPGTSTEPSE | GGTAGCGAACCGGCTACTTCTGGCTCTGAGACTCCA |
| | GSAP | GGTACTTCTACCGAACCGTCCGAAGGTAGCGCACCA |
| LCW0402_009_ | GSPAGSPTSTEEGSPA | GGTAGCCCGGCTGGCTCTCCAACCTCCACTGAGGAA |
| GFP-N_G07.ab1 | GSPTSTEEGSEPATSG | GGTAGCCCGGCTGGCTCTCCAACCTCCACTGAAGAA |
| | SETP | GGTAGCGAACCGGCTACCTCCGGCTCTGAAACTCCA |
| LCW0402_011_ | GSPAGSPTSTEEGTSE | GGTAGCCCGGCTGGCTCTCCTACCTCTACTGAGGAA |
| GFP-N_A08.ab1 | SATPESGPGTSTEPSE | GGTACTTCTGAAAGCGCTACTCCTGAGTCTGGTCCA |
| | GSAP | GGTACCTCTACTGAACCGTCCGAAGGTAGCGCTCCA |
| LCW0402_012_ | GSPAGSPTSTEEGSPA | GGTAGCCCTGCTGGCTCTCCGACTTCTACTGAGGAA |
| GFP-N_B08.ab1 | GSPTSTEEGTSTEPSE | GGTAGCCCGGCTGGTTCTCCGACTTCTACTGAGGAA |
| | GSAP | GGTACTTCTACCGAACCTTCCGAAGGTAGCGCTCCA |
| LCW0402_013_ | GTSESATPESGPGTST | GGTACTTCTGAAAGCGCTACTCCGGAGTCCGGTCCA |
| GFP-N_C08.ab1 | EPSEGSAPGTSTEPSE | GGTACCTCTACCGAACCGTCCGAAGGCAGCGCTCCA |
| | GSAP | GGTACTTCTACTGAACCTTCTGAGGGTAGCGCTCCA |
| LCW0402_014_ | GTSTEPSEGSAPGSPA | GGTACCTCTACCGAACCTTCCGAAGGTAGCGCTCCA |
| GFP-N_D08.ab1 | GSPTSTEEGTSTEPSE | GGTAGCCCGGCAGGTTCTCCTACTTCCACTGAGGAA |
| | GSAP | GGTACTTCTACCGAACCTTCTGAGGGTAGCGCACCA |
| LCW0402_015_ | GSEPATSGSETPGSPA | GGTAGCGAACCGGCTACTTCCGGCTCTGAGACTCCA |
| GFP-N_E08.ab1 | GSPTSTEEGTSESATP | GGTAGCCCTGCTGGCTCTCCGACCTCTACCGAAGAA |
| | ESGP | GGTACCTCTGAAAGCGCTACCCCTGAGTCTGGCCCA |
| LCW0402_016_ | GTSTEPSEGSAPGTSE | GGTACTTCTACCGAACCTTCCGAGGGCAGCGCACCA |
| GFP-N_F08.ab1 | SATPESGPGTSESATP | GGTACTTCTGAAAGCGCTACCCCTGAGTCCGGCCCA |
| | ESGP | GGTACTTCTGAAAGCGCTACTCCTGAATCCGGTCCA |
| LCW0402_020_ | GTSTEPSEGSAPGSEP | GGTACTTCTACTGAACCGTCTGAAGGCAGCGCACCA |
| GFP-N_G08.ab1 | ATSGSETPGSPAGSPT | GGTAGCGAACCGGCTACTTCCGGTTCTGAAACCCCA |
| | STEE | GGTAGCCCAGCAGGTTCTCCAACTTCTACTGAAGAA |
| LCW0402_023_ | GSPAGSPTSTEEGTSE | GGTAGCCCTGCTGGCTCTCCAACCTCCACCGAAGAA |
| GFP-N_A09.ab1 | SATPESGPGSEPATSG | GGTACCTCTGAAAGCGCAACCCCTGAATCCGGCCCA |
| | SETP | GGTAGCGAACCGGCAACCTCCGGTTCTGAAACCCCA |
| LCW0402_024_ | GTSESATPESGPGSPA | GGTACTTCTGAAAGCGCTACTCCTGAGTCCGGCCCA |
| GFP-N_B09.ab1 | GSPTSTEEGSPAGSPT | GGTAGCCCGGCTGGCTCTCCGACTTCCACCGAGGAA |
| | STEE | GGTAGCCCGGCTGGCTCTCCAACTTCTACTGAAGAA |
| LCW0402_025_ | GTSTEPSEGSAPGTSE | GGTACCTCTACTGAACCTTCTGAGGGCAGCGCTCCA |
| GFP-N_C09.ab1 | SATPESGPGTSTEPSE | GGTACTTCTGAAAGCGCTACCCCGGAGTCCGGTCCA |
| | GSAP | GGTACTTCTACTGAACCGTCCGAAGGTAGCGCACCA |
| LCW0402_026_ | GSPAGSPTSTEEGTST | GGTAGCCCGGCAGGCTCTCCGACTTCCACCGAGGAA |
| GFP-N_D09.ab1 | EPSEGSAPGSEPATSG | GGTACCTCTACTGAACCTTCTGAGGGTAGCGCTCCA |
| | SETP | GGTAGCGAACCGGCAACCTCTGGCTCTGAAACCCCA |
| LCW0402_027_ | GSPAGSPTSTEEGTST | GGTAGCCCAGCAGGCTCTCCGACTTCCACTGAGGAA |
| GFP-N_E09.ab1 | EPSEGSAPGTSTEPSE | GGTACTTCTACTGAACCTTCCGAAGGCAGCGCACCA |
| | GSAP | GGTACCTCTACTGAACCTTCTGAGGGCAGCGCTCCA |
| LCW0402_032_ | GSEPATSGSETPGTSE | GGTAGCGAACCTGCTACCTCCGGTTCTGAAACCCCA |
| GFP-N_H09.ab1 | SATPESGPGSPAGSPT | GGTACCTCTGAAAGCGCAACTCCGGAGTCTGGTCCA |
| | STEE | GGTAGCCCTGCAGGTTCTCCTACCTCCACTGAGGAA |
| LCW0402_034_ | GTSESATPESGPGTST | GGTACCTCTGAAAGCGCTACTCCGGAGTCTGGCCCA |
| GFP-N_A10.ab1 | EPSEGSAPGTSTEPSE | GGTACCTCTACTGAACCGTCTGAGGGTAGCGCTCCA |
| | GSAP | GGTACTTCTACTGAACCGTCCGAAGGTAGCGCACCA |
| LCW0402_036_ | GSPAGSPTSTEEGTST | GGTAGCCCGGCTGGTTCTCCGACTTCCACCGAGGAA |
| GFP-N_C10.ab1 | EPSEGSAPGTSTEPSE | GGTACCTCTACTGAACCTTCTGAGGGTAGCGCTCCA |
| | GSAP | GGTACCTCTACTGAACCTTCCGAAGGCAGCGCTCCA |
| LCW0402_039_ | GTSTEPSEGSAPGTST | GGTACTTCTACCGAACCGTCCGAGGGCAGCGCTCCA |
| GFP-N_E10.ab1 | EPSEGSAPGTSTEPSE | GGTACTTCTACTGAACCTTCTGAAGGCAGCGCTCCA |
| | GSAP | GGTACTTCTACTGAACCTTCCGAAGGTAGCGCACCA |
| LCW0402_040_ | GSEPATSGSETPGTSE | GGTAGCGAACCTGCAACCTCTGGCTCTGAAACCCCA |
| GFP-N_F10.ab1 | SATPESGPGTSTEPSE | GGTACCTCTGAAAGCGCTACTCCTGAATCTGGCCCA |
| | GSAP | GGTACTTCTACTGAACCGTCCGAGGGCAGCGCACCA |
| LCW0402_041_ | GTSTEPSEGSAPGSPA | GGTACTTCTACCGAACCGTCCGAGGGTAGCGCACCA |
| GFP-N_G10.ab1 | GSPTSTEEGTSTEPSE | GGTAGCCCAGCAGGTTCTCCTACCTCCACCGAGGAA |
| | GSAP | GGTACTTCTACCGAACCGTCCGAGGGTAGCGCACCA |
| LCW0402_050_ | GSEPATSGSETPGTSE | GGTAGCGAACCGGCAACCTCCGGCTCTGAAACTCCA |
| GFP-N_A11.ab1 | SATPESGPGSEPATSG | GGTACTTCTGAAAGCGCTACTCCGGAATCCGGCCCA |
| | SETP | GGTAGCGAACCGGCTACTTCCGGCTCTGAAACCCCA |
| LCW0402_051_ | GSEPATSGSETPGTSE | GGTAGCGAACCGGCAACTTCCGGCTCTGAAACCCCA |
| GFP-N_B11.ab1 | SATPESGPGSEPATSG | GGTACTTCTGAAAGCGCTACTCCTGAGTCTGGCCCA |
| | SETP | GGTAGCGAACCTGCTACCTCTGGCTCTGAAACCCCA |
| LCW0402_059_ | GSEPATSGSETPGSEP | GGTAGCGAACCGGCAACCTCTGGCTCTGAAACTCCA |
| GFP-N_E11.ab1 | ATSGSETPGTSTEPSE | GGTAGCGAACCTGCAACCTCCGGCTCTGAAACCCCA |
| | GSAP | GGTACTTCTACTGAACCTTCTGAGGGCAGCGCACCA |
| LCW0402_060_ | GTSESATPESGPGSEP | GGTACTTCTGAAAGCGCTACCCCGGAATCTGGCCCA |
| GFP-N_F11.ab1 | ATSGSETPGSEPATSG | GGTAGCGAACCGGCTACTTCTGGTTCTGAAACCCCA |
| | SETP | GGTAGCGAACCGGCTACCTCCGGTTCTGAAACTCCA |
| LCW0402_061_ | GTSTEPSEGSAPGTST | GGTACCTCTACTGAACCTTCCGAAGGCAGCGCTCCA |
| GFP-N_G11.ab1 | EPSEGSAPGTSESATP | GGTACCTCTACCGAACCGTCCGAGGGCAGCGCACCA |
| | ESGP | GGTACTTCTGAAAGCGCAACCCCTGAATCCGGTCCA |
| LCW0402_065_ | GSEPATSGSETPGTSE | GGTAGCGAACCGGCAACCTCTGGCTCTGAAACCCCA |
| GFP-N_A12.ab1 | SATPESGPGTSESATP | GGTACCTCTGAAAGCGCTACTCCGGAATCTGGTCCA |
| | ESGP | GGTACTTCTGAAAGCGCTACTCCGGAATCCGGTCCA |
| LCW0402_066_ | GSEPATSGSETPGSEP | GGTAGCGAACCTGCTACCTCCGGCTCTGAAACTCCA |
| GFP-N_B12.ab1 | ATSGSETPGTSTEPSE | GGTAGCGAACCGGCTACTTCCGGTTCTGAAACTCCA |
| | GSAP | GGTACCTCTACCGAACCTTCCGAAGGCAGCGCACCA |
| LCW0402_067_ | GSEPATSGSETPGTST | GGTAGCGAACCTGCTACTTCTGGTTCTGAAACTCCA |
| GFP-N_C12.ab1 | EPSEGSAPGSEPATSG | GGTACTTCTACCGAACCGTCCGAGGGTAGCGCTCCA |
| | SETP | GGTAGCGAACCTGCTACTTCTGGTTCTGAAACTCCA |
| LCW0402_069_ | GTSTEPSEGSAPGTST | GGTACCTCTACCGAACCGTCCGAGGGTAGCGCACCA |
| GFP-N_D12.ab1 | EPSEGSAPGSEPATSG | GGTACCTCTACTGAACCGTCTGAGGGTAGCGCTCCA |
| | SETP | GGTAGCGAACCGGCAACCTCCGGTTCTGAAACTCCA |
| LCW0402_073_ | GTSTEPSEGSAPGSEP | GGTACTTCTACTGAACCTTCCGAAGGTAGCGCTCCA |
| GFP-N_F12.ab1 | ATSGSETPGSPAGSPT | GGTAGCGAACCTGCTACTTCTGGTTCTGAAACCCCA |
| | STEE | GGTAGCCCGGCTGGCTCTCCGACCTCCACCGAGGAA |
| LCW0402_074_ | GSEPATSGSETPGSPA | GGTAGCGAACCGGCTACTTCCGGCTCTGAGACTCCA |
| GFP-N_G12.ab1 | GSPTSTEEGTSESATP | GGTAGCCCAGCTGGTTCTCCAACCTCTACTGAGGAA |
| | ESGP | GGTACTTCTGAAAGCGCTACCCCTGAATCTGGTCCA |
| LCW0402_075_ | GTSESATPESGPGSEP | GGTACCTCTGAAAGCGCAACTCCTGAGTCTGGCCCA |
| GFP-N_H12.ab1 | ATSGSETPGTSESATP | GGTAGCGAACCTGCTACCTCCGGCTCTGAGACTCCA |
| | ESGP | GGTACCTCTGAAAGCGCAACCCCGGAATCTGGTCCA |

### Example 3: Construction of XTEN_AF36 Segments

[0334] A codon library encoding sequences of 36 amino acid length was constructed. The sequences were designated XTEN_AF36. Its segments have the amino acid sequence [X]3 where X is a 12mer peptide with the sequence: GSTSESPSGTAP (SEQ ID NO: 407), GTSTPESGSASP (SEQ ID NO: 408), GTSPSGESSTAP (SEQ ID NO: 409), or GSTSSTAESPGP (SEQ ID NO: 410). The insert was obtained by annealing the following pairs of phosphorylated synthetic oligonucleotide pairs:

AF1for:
(SEQ ID NO: 411)
AGGTTCTACYAGCGAATCYCCKTCTGGYACYGCWCC
AF1rev:
(SEQ ID NO: 412)
ACCTGGWGCRGTRCCAGAMGGRGATTCGCTRGTAGA
AF2for:
(SEQ ID NO: 413)
AGGTACYTCTACYCCKGAAAGCGGYTCYGCWTCTCC
AF2rev:
(SEQ ID NO: 414)
ACCTGGAGAWGCRGARCCGCTTTCMGGRGTAGARGT
AF3for:
(SEQ ID NO: 415)
AGGTACYTCYCCKAGCGGYGAATCTTCTACYGCWCC
AF3rev:
(SEQ ID NO: 416)
ACCTGGWGCRGTAGAAGATTCRCCGCTMGGRGARGT
AF4for:
(SEQ ID NO: 417)
AGGTTCYACYAGCTCTACYGCWGAATCTCCKGGYCC
AF4rev:
(SEQ ID NO: 418)
ACCTGGRCCMGGAGATTCWGCRGTAGAGCTRGTRGA

[0335] We also annealed the phosphorylated oligonucleotide 3KpnIstopperFor: AGGTTCGTCTTCACTCGAGGGTAC (SEQ ID NO: 243) and the non-phosphorylated oligonucleotide pr_3 KpnIstopperRev: CCTCGAGTGAAGACGA (SEQ ID NO: 244). The annealed oligonucleotide pairs were ligated, which resulted in a mixture of products with varying length that represents the varying number of 12mer repeats ligated to one BbsI/KpnI segment The products corresponding to the length of 36 amino acids were isolated from the mixture by preparative agarose gel electrophoresis and ligated into the BsaI/KpnI digested stuffer vector pCW0359. Most of the clones in the resulting library designated LCW0403 showed green fluorescence after induction which shows that the sequence of XTEN_AF36 had been ligated in frame with the GFP gene and most sequences of XTEN_AF36 show good expression.

[0336] We screened 96 isolates from library LCW0403 for high level of fluorescence by stamping them onto agar plate containing IPTG. The same isolates were evaluated by PCR and 48 isolates were identified that contained segments with 36 amino acids as well as strong fluorescence. These isolates were sequenced and 44 clones were identified that contained correct XTEN_AF36 segments. The file names of the nucleotide and amino acid constructs for these segments are listed in Table 10.

TABLE 10
DNA and Amino Acid Sequences for 36-mer motifs (SEQ ID NOS 419-506, respectively,
in order of appearance)

| File name | Amino acid sequence | Nucleotide sequence |
|---|---|---|
| LCW0403_004_ | GTSTPESGSASPGTSP | GGTACTTCTACTCCGGAAAGCGGTTCCGCATCTCCA |
| GFP-N_A01.ab1 | SGESSTAPGTSPSGES | GGTACTTCTCCTAGCGGTGAATCTTCTACTGCTCCAG |
| | STAP | GTACCTCTCCTAGCGGCGAATCTTCTACTGCTCCA |
| LCW0403_005_ | GTSPSGESSTAPGSTS | GGTACTTCTCCGAGCGGTGAATCTTCTACCGCACCA |
| GFP-N_B01.ab1 | STAESPGPGTSPSGES | GGTTCTACTAGCTCTACCGCTGAATCTCCGGGCCCAG |
| | STAP | GTACTTCTCCGAGCGGTGAATCTTCTACTGCTCCA |
| LCW0403_006_ | GSTSSTAESPGPGTSP | GGTTCCACCAGCTCTACTGCTGAATCTCCTGGTCCAG |
| GFP-N_C01.ab1 | SGESSTAPGTSTPESG | GTACCTCTCCTAGCGGTGAATCTTCTACTGCTCCAGG |
| | SASP | TACTTCTACTCCTGAAAGCGGCTCTGCTTCTCCA |
| LCW0403_007_ | GSTSSTAESPGPGSTS | GGTTCTACCAGCTCTACTGCAGAATCTCCTGGCCCAG |
| GFP-N_D01.ab1 | STAESPGPGTSPSGES | GTTCCACCAGCTCTACCGCAGAATCTCCGGGTCCAG |
| | STAP | GTACTTCCCCTAGCGGTGAATCTTCTACCGCACCA |
| LCW0403_008_ | GSTSSTAESPGPGTSP | GGTTCTACTAGCTCTACTGCTGAATCTCCTGGCCCAG |
| GFP-N_E01.ab1 | SGESSTAPGTSTPESG | GTACTTCTCCTAGCGGTGAATCTTCTACCGCTCCAGG |
| | SASP | TACCTCTACTCCGGAAAGCGGTTCTGCATCTCCA |
| LCW0403_010_ | GSTSSTAESPGPGTST | GGTTCTACCAGCTCTACCGCAGAATCTCCTGGTCCAG |
| GFP-N_F01.ab1 | PESGSASPGSTSESPS | GTACCTCTACTCCGGAAAGCGGCTCTGCATCTCCAG |
| | GTAP | GTTCTACTAGCGAATCTCCTTCTGGCACTGCACCA |
| LCW0403_011_ | GSTSSTAESPGPGTST | GGTTCTACTAGCTCTACTGCAGAATCTCCTGGCCCAG |
| GFP-N_G01.ab1 | PESGSASPGTSTPESG | GTACCTCTACTCCGGAAAGCGGCTCTGCATCTCCAG |
| | SASP | GTACTTCTACCCCTGAAAGCGGTTCTGCATCTCCA |
| LCW0403_012_ | GSTSESPSGTAPGTSP | GGTTCTACCAGCGAATCTCCTTCTGGCACCGCTCCAG |
| GFP-N_H01.ab1 | SGESSTAPGSTSESPS | GTACCTCTCCTAGCGGCGAATCTTCTACCGCTCCAGG |
| | GTAP | TTCTACTAGCGAATCTCCTTCTGGCACTGCACCA |
| LCW0403_013_ | GSTSSTAESPGPGSTS | GGTTCCACCAGCTCTACTGCAGAATCTCCGGGCCCA |
| GFP-N_A02.ab1 | STAESPGPGTSPSGES | GGTTCTACTAGCTCTACTGCAGAATCTCCGGGTCCAG |
| | STAP | GTACTTCTCCTAGCGGCGAATCTTCTACCGCTCCA |
| LCW0403_014_ | GSTSSTAESPGPGTST | GGTTCCACTAGCTCTACTGCAGAATCTCCTGGCCCAG |
| GFP-N_B02.ab1 | PESGSASPGSTSESPS | GTACCTCTACCCCTGAAAGCGGCTCTGCATCTCCAG |
| | GTAP | GTTCTACCAGCGAATCCCCGTCTGGCACCGCACCA |
| LCW0403_015_ | GSTSSTAESPGPGSTS | GGTTCTACTAGCTCTACTGCTGAATCTCCGGGTCCAG |
| GFP-N_C02.ab1 | STAESPGPGTSPSGES | GTTCTACCAGCTCTACTGCTGAATCTCCTGGTCCAGG |
| | STAP | TACCTCCCCGAGCGGTGAATCTTCTACTGCACCA |
| LCW0403_017_ | GSTSSTAESPGPGSTS | GGTTCTACCAGCTCTACCGCTGAATCTCCTGGCCCAG |
| GFP-N_D02.ab1 | ESPSGTAPGSTSSTAE | GTTCTACCAGCGAATCCCCGTCTGGCACCGCACCAG |
| | SPGP | GTTCTACTAGCTCTACCGCTGAATCTCCGGGTCCA |
| LCW0403_018_ | GSTSSTAESPGPGSTS | GGTTCTACCAGCTCTACCGCAGAATCTCCTGGCCCA |
| GFP-N_E02.ab1 | STAESPGPGSTSSTAE | GGTTCCACTAGCTCTACCGCTGAATCTCCTGGTCCAG |
| | SPGP | GTTCTACTAGCTCTACCGCTGAATCTCCTGGTCCA |
| LCW0403_019_ | GSTSESPSGTAPGSTS | GGTTCTACTAGCGAATCCCCTTCTGGTACTGCTCCAG |
| GFP-N_F02.ab1 | STAESPGPGSTSSTAE | GTTCCACTAGCTCTACCGCTGAATCTCCTGGCCCAGG |
| | SPGP | TTCCACTAGCTCTACTGCAGAATCTCCTGGTCCA |
| LCW0403_023_ | GSTSESPSGTAPGSTS | GGTTCTACTAGCGAATCTCCTTCTGGTACCGCTCCAG |
| GFP-N_H02.ab1 | ESPSGTAPGSTSESPS | GTTCTACCAGCGAATCCCCGTCTGGTACTGCTCCAGG |
| | GTAP | TTCTACCAGCGAATCTCCTTCTGGTACTGCACCA |
| LCW0403_024_ | GSTSSTAESPGPGSTS | GGTTCCACCAGCTCTACTGCTGAATCTCCTGGCCCAG |
| GFP-N_A03.ab1 | STAESPGPGSTSSTAE | GTTCTACCAGCTCTACTGCTGAATCTCCGGGCCCAGG |
| | SPGP | TTCCACCAGCTCTACCGCTGAATCTCCGGGTCCA |
| LCW0403_025_ | GSTSSTAESPGPGSTS | GGTTCCACTAGCTCTACCGCAGAATCTCCTGGTCCAG |
| GFP-N_B03.ab1 | STAESPGPGTSPSGES | GTTCTACTAGCTCTACTGCTGAATCTCCGGGTCCAGG |
| | STAP | TACCTCCCCTAGCGGCGAATCTTCTACCGCTCCA |
| LCW0403_028_ | GSSPSASTGTGPGSST | GGTTCTAGCCCTTCTGCTTCCACCGGTACCGGCCCAG |
| GFP-N_D03.ab1 | PSGATGSPGSSTPSGA | GTAGCTCTACTCCGTCTGGTGCAACTGGCTCTCCAGG |
| | TGSP | TAGCTCTACTCCGTCTGGTGCAACCGGCTCCCCA |
| LCW0403_029_ | GTSPSGESSTAPGTST | GGTACTTCCCCTAGCGGTGAATCTTCTACTGCTCCAG |
| GFP-N_E03.ab1 | PESGSASPGSTSSTAE | GTACCTCTACTCCGGAAAGCGGCTCCGCATCTCCAG |
| | SPGP | GTTCTACTAGCTCTACTGCTGAATCTCCTGGTCCA |
| LCW0403_030_ | GSTSSTAESPGPGSTS | GGTTCTACTAGCTCTACCGCTGAATCTCCGGGTCCAG |
| GFP-N_F03.ab1 | STAESPGPGTSTPESG | GTTCTACCAGCTCTACTGCAGAATCTCCTGGCCCAGG |
| | SASP | TACTTCTACTCCGGAAAGCGGTTCCGCTTCTCCA |
| LCW0403_031_ | GTSPSGESSTAPGSTS | GGTACTTCTCCTAGCGGTGAATCTTCTACCGCTCCAG |
| GFP-N_G03.ab1 | STAESPGPGTSTPESG | GTTCTACCAGCTCTACTGCTGAATCTCCTGGCCCAGG |
| | SASP | TACTTCTACCCCGGAAAGCGGCTCCGCTTCTCCA |
| LCW0403_033_ | GSTSESPSGTAPGSTS | GGTTCTACTAGCGAATCCCCTTCTGGTACTGCACCAG |
| GFP-N_H03.ab1 | STAESPGPGSTSSTAE | GTTCTACCAGCTCTACTGCTGAATCTCCGGGCCCAGG |
| | SPGP | TTCCACCAGCTCTACCGCAGAATCTCCTGGTCCA |
| LCW0403_035_ | GSTSSTAESPGPGSTS | GGTTCCACCAGCTCTACCGCTGAATCTCCGGGCCCA |
| GFP-N_A04.ab1 | ESPSGTAPGSTSSTAE | GGTTCTACCAGCGAATCCCCTTCTGGCACTGCACCA |
| | SPGP | GGTTCTACTAGCTCTACCGCAGAATCTCCGGGCCCA |
| LCW0403_036_ | GSTSSTAESPGPGTSP | GGTTCTACCAGCTCTACTGCTGAATCTCCGGGTCCAG |
| GFP-N_B04.ab1 | SGESSTAPGTSTPESG | GTACTTCCCCGAGCGGTGAATCTTCTACTGCACCAG |
| | SASP | GTACTTCTACTCCGGAAAGCGGTTCCGCTTCTCCA |
| LCW0403_039_ | GSTSESPSGTAPGSTS | GGTTCTACCAGCGAATCTCCTTCTGGCACCGCTCCAG |
| GFP-N_C04.ab1 | ESPSGTAPGTSPSGES | GTTCTACTAGCGAATCCCCGTCTGGTACCGCACCAG |
| | STAP | GTACTTCTCCTAGCGGCGAATCTTCTACCGCACCA |
| LCW0403_041_ | GSTSESPSGTAPGSTS | GGTTCTACCAGCGAATCCCCTTCTGGTACTGCTCCAG |
| GFP-N_D04.ab1 | ESPSGTAPGTSTPESG | GTTCTACCAGCGAATCCCCTTCTGGCACCGCACCAG |
| | SASP | GTACTTCTACCCCTGAAAGCGGCTCCGCTTCTCCA |
| LCW0403_044_ | GTSTPESGSASPGSTS | GGTACCTCTACTCCTGAAAGCGGTTCTGCATCTCCAG |
| GFP-N_E04.ab1 | STAESPGPGSTSSTAE | GTTCCACTAGCTCTACCGCAGAATCTCCGGGCCCAG |
| | SPGP | GTTCTACTAGCTCTACTGCTGAATCTCCTGGCCCA |
| LCW0403_046_ | GSTSESPSGTAPGSTS | GGTTCTACCAGCGAATCCCCTTCTGGCACTGCACCA |
| GFP-N_F04.ab1 | ESPSGTAPGTSPSGES | GGTTCTACTAGCGAATCCCCTTCTGGTACCGCACCAG |
| | STAP | GTACTTCTCCGAGCGGCGAATCTTCTACTGCTCCA |
| LCW0403_047_ | GSTSSTAESPGPGSTS | GGTTCTACTAGCTCTACCGCTGAATCTCCTGGCCCAG |
| GFP-N_G04.ab1 | STAESPGPGSTSESPS | GTTCCACTAGCTCTACCGCAGAATCTCCGGGCCCAG |
| | GTAP | GTTCTACTAGCGAATCCCCTTCTGGTACCGCTCCA |
| LCW0403_049_ | GSTSSTAESPGPGSTS | GGTTCCACCAGCTCTACTGCAGAATCTCCTGGCCCA |
| GFP-N_H04.ab1 | STAESPGPGTSTPESG | GGTTCTACTAGCTCTACCGCAGAATCTCCTGGTCCAG |
| | SASP | GTACCTCTACTCCTGAAAGCGGTTCCGCATCTCCA |
| LCW0403_051_ | GSTSSTAESPGPGSTS | GGTTCTACTAGCTCTACTGCTGAATCTCCGGGCCCAG |
| GFP-N_A05.ab1 | STAESPGPGSTSESPS | GTTCTACTAGCTCTACCGCTGAATCTCCGGGTCCAGG |
| | GTAP | TTCTACTAGCGAATCTCCTTCTGGTACCGCTCCA |
| LCW0403_053_ | GTSPSGESSTAPGSTS | GGTACCTCCCCGAGCGGTGAATCTTCTACTGCACCA |
| GFP-N_B05.ab1 | ESPSGTAPGSTSSTAE | GGTTCTACTAGCGAATCCCCTTCTGGTACTGCTCCAG |
| | SPGP | GTTCCACCAGCTCTACTGCAGAATCTCCGGGTCCA |
| LCW0403_054_ | GSTSESPSGTAPGTSP | GGTTCTACTAGCGAATCCCCGTCTGGTACTGCTCCAG |
| GFP-N_C05.ab1 | SGESSTAPGSTSSTAE | GTACTTCCCCTAGCGGTGAATCTTCTACTGCTCCAGG |
| | SPGP | TTCTACCAGCTCTACCGCAGAATCTCCGGGTCCA |
| LCW0403_057_ | GSTSSTAESPGPGSTS | GGTTCTACCAGCTCTACCGCTGAATCTCCTGGCCCAG |
| GFP-N_D05.ab1 | ESPSGTAPGTSPSGES | GTTCTACTAGCGAATCTCCGTCTGGCACCGCACCAG |
| | STAP | GTACTTCCCCTAGCGGTGAATCTTCTACTGCACCA |
| LCW0403_058_ | GSTSESPSGTAPGSTS | GGTTCTACTAGCGAATCTCCTTCTGGCACTGCACCAG |
| GFP-N_E05.ab1 | ESPSGTAPGTSTPESG | GTTCTACCAGCGAATCTCCGTCTGGCACTGCACCAG |
| | SASP | GTACCTCTACCCCTGAAAGCGGTTCCGCTTCTCCA |
| LCW0403_060_ | GTSTPESGSASPGSTS | GGTACCTCTACTCCGGAAAGCGGTTCCGCATCTCCA |
| GFP-N_F05.ab1 | ESPSGTAPGSTSSTAE | GGTTCTACCAGCGAATCCCCGTCTGGCACCGCACCA |
| | SPGP | GGTTCTACTAGCTCTACTGCTGAATCTCCGGGCCCA |
| LCW0403_063_ | GSTSSTAESPGPGTSP | GGTTCTACTAGCTCTACTGCAGAATCTCCGGGCCCA |
| GFP-N_G05.ab1 | SGESSTAPGTSPSGES | GGTACCTCTCCTAGCGGTGAATCTTCTACCGCTCCAG |
| | STAP | GTACTTCTCCGAGCGGTGAATCTTCTACCGCTCCA |
| LCW0403_064_ | GTSPSGESSTAPGTSP | GGTACCTCCCCTAGCGGCGAATCTTCTACTGCTCCAG |
| GFP-N_H05.ab1 | SGESSTAPGTSPSGES | GTACCTCTCCTAGCGGCGAATCTTCTACCGCTCCAGG |
| | STAP | TACCTCCCCTAGCGGTGAATCTTCTACCGCACCA |
| LCW0403_065_ | GSTSSTAESPGPGTST | GGTTCCACTAGCTCTACTGCTGAATCTCCTGGCCCAG |
| GFP-N_A06.ab1 | PESGSASPGSTSESPS | GTACTTCTACTCCGGAAAGCGGTTCCGCTTCTCCAGG |
| | GTAP | TTCTACTAGCGAATCTCCGTCTGGCACCGCACCA |
| LCW0403_066_ | GSTSESPSGTAPGTSP | GGTTCTACTAGCGAATCTCCGTCTGGCACTGCTCCAG |
| GFP-N_B06.ab1 | SGESSTAPGTSPSGES | GTACTTCTCCTAGCGGTGAATCTTCTACCGCTCCAGG |
| | STAP | TACTTCCCCTAGCGGCGAATCTTCTACCGCTCCA |
| LCW0403_067_ | GSTSESPSGTAPGTST | GGTTCTACTAGCGAATCTCCTTCTGGTACCGCTCCAG |
| GFP-N_C06.ab1 | PESGSASPGSTSSTAE | GTACTTCTACCCCTGAAAGCGGCTCCGCTTCTCCAGG |
| | SPGP | TTCCACTAGCTCTACCGCTGAATCTCCGGGTCCA |
| LCW0403_068_ | GSTSSTAESPGPGSTS | GGTTCCACTAGCTCTACTGCTGAATCTCCTGGCCCAG |
| GFP-N_D06.ab1 | STAESPGPGSTSESPS | GTTCTACCAGCTCTACCGCTGAATCTCCTGGCCCAGG |
| | GTAP | TTCTACCAGCGAATCTCCGTCTGGCACCGCACCA |
| LCW0403_069_ | GSTSESPSGTAPGTST | GGTTCTACTAGCGAATCCCCGTCTGGTACCGCACCA |
| GFP-N_E06.ab1 | PESGSASPGTSTPESG | GGTACTTCTACCCCGGAAAGCGGCTCTGCTTCTCCAG |
| | SASP | GTACTTCTACCCCGGAAAGCGGCTCCGCATCTCCA |
| LCW0403_070_ | GSTSESPSGTAPGTST | GGTTCTACTAGCGAATCCCCGTCTGGTACTGCTCCAG |
| GFP-N_F06.ab1 | PESGSASPGTSTPESG | GTACTTCTACTCCTGAAAGCGGTTCCGCTTCTCCAGG |
| | SASP | TACCTCTACTCCGGAAAGCGGTTCTGCATCTCCA |

### Example 4: Construction of XTEN_AG36 Segments

[0337] A codon library encoding sequences of 36 amino acid length was constructed. The sequences were designated XTEN_AG36. Its segments have the amino acid sequence [X]3 where X is a 12mer peptide with the sequence: GTPGSGTASSSP (SEQ ID NO: 507), GSSTPSGATGSP (SEQ ID NO: 508), GSSPSASTGTGP (SEQ ID NO: 509), or GASPGTSSTGSP (SEQ ID NO: 510). The insert was obtained by annealing the following pairs of phosphorylated synthetic oligonucleotide pairs:

AG1for:
(SEQ ID NO: 511)
AGGTACYCCKGGYAGCGGTACYGCWTCTTCYTCTCC
AG1rev:
(SEQ ID NO: 512)
ACCTGGAGARGAAGAWGCRGTACCGCTRCCMGGRGT
AG2for:
(SEQ ID NO: 513)
AGGTAGCTCTACYCCKTCTGGTGCWACYGGYTCYCC
AG2rev:
(SEQ ID NO: 514)
ACCTGGRGARCCRGTWGCACCAGAMGGRGTAGAGCT
AG3for:
(SEQ ID NO: 515)
AGGTTCTAGCCCKTCTGCWTCYACYGGTACYGGYCC
AG3rev:
(SEQ ID NO: 516)
ACCTGGRCCRGTACCRGTRGAWGCAGAMGGGCTAGA
AG4for:
(SEQ ID NO: 517)
AGGTGCWTCYCCKGGYACYAGCTCTACYGGTTCTCC
AG4rev:
(SEQ ID NO: 518)
ACCTGGAGAACCRGTAGAGCTRGTRCCMGGRGAWGC

[0338] We also annealed the phosphorylated oligonucleotide 3KpnIstopperFor: AGGTTCGTCTTCACTCGAGGGTAC (SEQ ID NO: 243) and the non-phosphorylated oligonucleotide pr_3 KpnIstopperRev: CCTCGAGTGAAGACGA (SEQ ID NO: 244). The annealed oligonucleotide pairs were ligated, which resulted in a mixture of products with varying length that represents the varying number of 12mer repeats ligated to one BbsI/KpnI segment. The products corresponding to the length of 36 amino acids were isolated from the mixture by preparative agarose gel electrophoresis and ligated into the BsaI/KpnI digested stuffer vector pCW0359. Most of the clones in the resulting library designated LCW0404 showed green fluorescence after induction which shows that the sequence of XTEN_AG36 had been ligated in frame with the GFP gene and most sequences of XTEN_AG36 show good expression.

[0339] We screened 96 isolates from library LCW0404 for high level of fluorescence by stamping them onto agar plate containing IPTG. The same isolates were evaluated by PCR and 48 isolates were identified that contained segments with 36 amino acids as well as strong fluorescence. These isolates were sequenced and 44 clones were identified that contained correct XTEN_AG36 segments. The file names of the nucleotide and amino acid constructs for these segments are listed in Table 11.

TABLE 11
DNA and Amino Acid Sequences for 36-mer motifs (SEQ ID NOS 519-606, respectively,
in order of appearance)

| File name | Amino acid sequence | Nucleotide sequence |
|---|---|---|
| LCW0404_001_ | GASPGTSSTGSPGTPG | GGTGCATCCCCGGGCACTAGCTCTACCGGTTCTCCAGGTA |
| GFP-N_A07.ab1 | SGTASSSPGSSTPSGA | CTCCTGGTAGCGGTACTGCTTCTTCTTCTCCAGGTAGCTCT |
| | TGSP | ACTCCTTCTGGTGCTACTGGTTCTCCA |
| LCW0404_003_ | GSSTPSGATGSPGSSP | GGTAGCTCTACCCCTTCTGGTGCTACCGGCTCTCCAGGTT |
| GFP-N_B07.ab1 | SASTGTGPGSSTPSGA | CTAGCCCGTCTGCTTCTACCGGTACCGGTCCAGGTAGCTC |
| | TGSP | TACCCCTTCTGGTGCTACTGGTTCTCCA |
| LCW0404_006_ | GASPGTSSTGSPGSSP | GGTGCATCTCCGGGTACTAGCTCTACCGGTTCTCCAGGTT |
| GFP-N_C07.ab1 | SASTGTGPGSSTPSGA | CTAGCCCTTCTGCTTCCACTGGTACCGGCCCAGGTAGCTC |
| | TGSP | TACCCCGTCTGGTGCTACTGGTTCCCCA |
| LCW0404_007_ | GTPGSGTASSSPGSST | GGTACTCCGGGCAGCGGTACTGCTTCTTCCTCTCCAGGTA |
| GFP-N_D07.ab1 | PSGATGSPGASPGTSS | GCTCTACCCCTTCTGGTGCAACTGGTTCCCCAGGTGCATC |
| | TGSP | CCCTGGTACTAGCTCTACCGGTTCTCCA |
| LCW0404_009_ | GTPGSGTASSSPGASP | GGTACCCCTGGCAGCGGTACTGCTTCTTCTTCTCCAGGTG |
| GFP-N_E07.ab1 | GTSSTGSPGSRPSAST | CTTCCCCTGGTACCAGCTCTACCGGTTCTCCAGGTTCTAG |
| | GTGP | ACCTTCTGCATCCACCGGTACTGGTCCA |
| LCW0404_011_ | GASPGTSSTGSPGSST | GGTGCATCTCCTGGTACCAGCTCTACCGGTTCTCCAGGTA |
| GFP-N_F07.ab1 | PSGATGSPGASPGTSS | GCTCTACTCCTTCTGGTGCTACTGGCTCTCCAGGTGCTTCC |
| | TGSP | CCGGGTACCAGCTCTACCGGTTCTCCA |
| LCW0404_012_ | GTPGSGTASSSPGSST | GGTACCCCGGGCAGCGGTACCGCATCTTCCTCTCCAGGTA |
| GFP-N_G07.ab1 | PSGATGSPGSSTPSGA | GCTCTACCCCGTCTGGTGCTACCGGTTCCCCAGGTAGCTC |
| | TGSP | TACCCCGTCTGGTGCAACCGGCTCCCCA |
| LCW0404_014_ | GASPGTSSTGSPGASP | GGTGCATCTCCGGGCACTAGCTCTACTGGTTCTCCAGGTG |
| GFP-N_H07.ab1 | GTSSTGSPGASPGTSS | CATCCCCTGGCACTAGCTCTACTGGTTCTCCAGGTGCTTC |
| | TGSP | TCCTGGTACCAGCTCTACTGGTTCTCCA |
| LCW0404_015_ | GSSTPSGATGSPGSSP | GGTAGCTCTACTCCGTCTGGTGCAACCGGCTCCCCAGGTT |
| GFP-N_A08.ab1 | SASTGTGPGASPGTSS | CTAGCCCGTCTGCTTCCACTGGTACTGGCCCAGGTGCTTC |
| | TGSP | CCCGGGCACCAGCTCTACTGGTTCTCCA |
| LCW0404_016_ | GSSTPSGATGSPGSST | GGTAGCTCTACTCCTTCTGGTGCTACCGGTTCCCCAGGTA |
| GFP-N_B08.ab1 | PSGATGSPGTPGSGT | GCTCTACTCCTTCTGGTGCTACTGGTTCCCCAGGTACTCC |
| | ASSSP | GGGCAGCGGTACTGCTTCTTCCTCTCCA |
| LCW0404_017_ | GSSTPSGATGSPGSST | GGTAGCTCTACTCCGTCTGGTGCAACCGGTTCCCCAGGTA |
| GFP-N_C08.ab1 | PSGATGSPGASPGTSS | GCTCTACTCCTTCTGGTGCTACTGGCTCCCCAGGTGCATC |
| | TGSP | CCCTGGCACCAGCTCTACCGGTTCTCCA |
| LCW0404_018_ | GTPGSGTASSSPGSSP | GGTACTCCTGGTAGCGGTACCGCATCTTCCTCTCCAGGTT |
| GFP-N_D08.ab1 | SASTGTGPGSSTPSGA | CTAGCCCTTCTGCATCTACCGGTACCGGTCCAGGTAGCTC |
| | TGSP | TACTCCTTCTGGTGCTACTGGCTCTCCA |
| LCW0404_023_ | GASPGTSSTGSPGSSP | GGTGCTTCCCCGGGCACTAGCTCTACCGGTTCTCCAGGTT |
| GFP-N_F08.ab1 | SASTGTGPGTPGSGT | CTAGCCCTTCTGCATCTACTGGTACTGGCCCAGGTACTCC |
| | ASSSP | GGGCAGCGGTACTGCTTCTTCCTCTCCA |
| LCW0404_025_ | GSSTPSGATGSPGSST | GGTAGCTCTACTCCGTCTGGTGCTACCGGCTCTCCAGGTA |
| GFP-N_G08.ab1 | PSGATGSPGASPGTSS | GCTCTACCCCTTCTGGTGCAACCGGCTCCCCAGGTGCTTC |
| | TGSP | TCCGGGTACCAGCTCTACTGGTTCTCCA |
| LCW0404_029_ | GTPGSGTASSSPGSST | GGTACCCCTGGCAGCGGTACCGCTTCTTCCTCTCCAGGTA |
| GFP-N_A09.ab1 | PSGATGSPGSSPSAST | GCTCTACCCCGTCTGGTGCTACTGGCTCTCCAGGTTCTAG |
| | GTGP | CCCGTCTGCATCTACCGGTACCGGCCCA |
| LCW0404_030_ | GSSTPSGATGSPGTPG | GGTAGCTCTACTCCTTCTGGTGCAACCGGCTCCCCAGGTA |
| GFP-N_B09.ab1 | SGTASSSPGTPGSGTA | CCCCGGGCAGCGGTACCGCATCTTCCTCTCCAGGTACTCC |
| | SSSP | GGGTAGCGGTACTGCTTCTTCTTCTCCA |
| LCW0404_031_ | GTPGSGTASSSPGSST | GGTACCCCGGGTAGCGGTACTGCTTCTTCCTCTCCAGGTA |
| GFP-N_C09.ab1 | PSGATGSPGASPGTSS | GCTCTACCCCTTCTGGTGCAACCGGCTCTCCAGGTGCTTC |
| | TGSP | TCCGGGCACCAGCTCTACCGGTTCTCCA |
| LCW0404_034_ | GSSTPSGATGSPGSST | GGTAGCTCTACCCCGTCTGGTGCTACCGGCTCTCCAGGTA |
| GFP-N_D09.ab1 | PSGATGSPGASPGTSS | GCTCTACCCCGTCTGGTGCAACCGGCTCCCCAGGTGCATC |
| | TGSP | CCCGGGTACTAGCTCTACCGGTTCTCCA |
| LCW0404_035_ | GASPGTSSTGSPGTPG | GGTGCTTCTCCGGGCACCAGCTCTACTGGTTCTCCAGGTA |
| GFP-N_E09.ab1 | SGTASSSPGSSTPSGA | CCCCGGGCAGCGGTACCGCATCTTCTTCTCCAGGTAGCTC |
| | TGSP | TACTCCTTCTGGTGCAACTGGTTCTCCA |
| LCW0404_036_ | GSSPSASTGTGPGSST | GGTTCTAGCCCGTCTGCTTCCACCGGTACTGGCCCAGGTA |
| GFP-N_F09.ab1 | PSGATGSPGTPGSGT | GCTCTACCCCGTCTGGTGCAACTGGTTCCCCAGGTACCCC |
| | ASSSP | TGGTAGCGGTACCGCTTCTTCTTCTCCA |
| LCW0404_037_ | GASPGTSSTGSPGSSP | GGTGCTTCTCCGGGCACCAGCTCTACTGGTTCTCCAGGTT |
| GFP-N_G09.ab1 | SASTGTGPGSSTPSGA | CTAGCCCTTCTGCATCCACCGGTACCGGTCCAGGTAGCTC |
| | TGSP | TACCCCTTCTGGTGCAACCGGCTCTCCA |
| LCW0404_040_ | GASPGTSSTGSPGSST | GGTGCATCCCCGGGCACCAGCTCTACCGGTTCTCCAGGTA |
| GFP-N_H09.ab1 | PSGATGSPGSSTPSGA | GCTCTACCCCGTCTGGTGCTACCGGCTCTCCAGGTAGCTC |
| | TGSP | TACCCCGTCTGGTGCTACTGGCTCTCCA |
| LCW0404_041_ | GTPGSGTASSSPGSST | GGTACCCCTGGTAGCGGTACTGCTTCTTCCTCTCCAGGTA |
| GFP-N_A10.ab1 | PSGATGSPGTPGSGT | GCTCTACTCCGTCTGGTGCTACCGGTTCTCCAGGTACCCC |
| | ASSSP | GGGTAGCGGTACCGCATCTTCTTCTCCA |
| LCW0404_043_ | GSSPSASTGTGPGSST | GGTTCTAGCCCTTCTGCTTCCACCGGTACTGGCCCAGGTA |
| GFP-N_C10.ab1 | PSGATGSPGSSTPSGA | GCTCTACCCCTTCTGGTGCTACCGGCTCCCCAGGTAGCTC |
| | TGSP | TACTCCTTCTGGTGCAACTGGCTCTCCA |
| LCW0404_045_ | GASPGTSSTGSPGSSP | GGTGCTTCTCCTGGCACCAGCTCTACTGGTTCTCCAGGTT |
| GFP-N_D10.ab1 | SASTGTGPGSSPSAST | CTAGCCCTTCTGCTTCTACCGGTACTGGTCCAGGTTCTAG |
| | GTGP | CCCTTCTGCATCCACTGGTACTGGTCCA |
| LCW0404_047_ | GTPGSGTASSSPGASP | GGTACTCCTGGCAGCGGTACCGCTTCTTCTTCTCCAGGTG |
| GFP-N_F10.ab1 | GTSSTGSPGASPGTSS | CTTCTCCTGGTACTAGCTCTACTGGTTCTCCAGGTGCTTCT |
| | TGSP | CCGGGCACTAGCTCTACTGGTTCTCCA |
| LCW0404_048_ | GSSTPSGATGSPGASP | GGTAGCTCTACCCCGTCTGGTGCTACCGGTTCCCCAGGTG |
| GFP-N_G10.ab1 | GTSSTGSPGSSTPSGA | CTTCTCCTGGTACTAGCTCTACCGGTTCTCCAGGTAGCTC |
| | TGSP | TACCCCGTCTGGTGCTACTGGCTCTCCA |
| LCW0404_049_ | GSSTPSGATGSPGTPG | GGTAGCTCTACCCCGTCTGGTGCTACTGGTTCTCCAGGTA |
| GFP-N_H10.ab1 | SGTASSSPGSSTPSGA | CTCCGGGCAGCGGTACTGCTTCTTCCTCTCCAGGTAGCTC |
| | TGSP | TACCCCTTCTGGTGCTACTGGCTCTCCA |
| LCW0404_050_ | GASPGTSSTGSPGSSP | GGTGCATCTCCTGGTACCAGCTCTACTGGTTCTCCAGGTT |
| GFP-N_A11.ab1 | SASTGTGPGSSTPSGA | CTAGCCCTTCTGCTTCTACCGGTACCGGTCCAGGTAGCTC |
| | TGSP | TACTCCTTCTGGTGCTACCGGTTCTCCA |
| LCW0404_051_ | GSSTPSGATGSPGSST | GGTAGCTCTACCCCGTCTGGTGCTACTGGCTCTCCAGGTA |
| GFP-N_B11.ab1 | PSGATGSPGSSTPSGA | GCTCTACTCCTTCTGGTGCTACTGGTTCCCCAGGTAGCTC |
| | TGSP | TACCCCGTCTGGTGCAACTGGCTCTCCA |
| LCW0404_052_ | GASPGTSSTGSPGTPG | GGTGCATCCCCGGGTACCAGCTCTACCGGTTCTCCAGGTA |
| GFP-N_C11.ab1 | SGTASSSPGASPGTSS | CTCCTGGCAGCGGTACTGCATCTTCCTCTCCAGGTGCTTC |
| | TGSP | TCCGGGCACCAGCTCTACTGGTTCTCCA |
| LCW0404_053_ | GSSTPSGATGSPGSSP | GGTAGCTCTACTCCTTCTGGTGCAACTGGTTCTCCAGGTT |
| GFP-N_D11.ab1 | SASTGTGPGASPGTSS | CTAGCCCGTCTGCATCCACTGGTACCGGTCCAGGTGCTTC |
| | TGSP | CCCTGGCACCAGCTCTACCGGTTCTCCA |
| LCW0404_057_ | GASPGTSSTGSPGSST | GGTGCATCTCCTGGTACTAGCTCTACTGGTTCTCCAGGTA |
| GFP-N_E11.ab1 | PSGATGSPGSSPSAST | GCTCTACTCCGTCTGGTGCAACCGGCTCTCCAGGTTCTAG |
| | GTGP | CCCTTCTGCATCTACCGGTACTGGTCCA |
| LCW0404_060_ | GTPGSGTASSSPGSST | GGTACTCCTGGCAGCGGTACCGCATCTTCCTCTCCAGGTA |
| GFP-N_F11.ab1 | PSGATGSPGASPGTSS | GCTCTACTCCGTCTGGTGCAACTGGTTCCCCAGGTGCTTC |
| | TGSP | TCCGGGTACCAGCTCTACCGGTTCTCCA |
| LCW0404_062_ | GSSTPSGATGSPGTPG | GGTAGCTCTACCCCGTCTGGTGCAACCGGCTCCCCAGGTA |
| GFP-N_G11.ab1 | SGTASSSPGSSTPSGA | CTCCTGGTAGCGGTACCGCTTCTTCTTCTCCAGGTAGCTC |
| | TGSP | TACTCCGTCTGGTGCTACCGGCTCCCCA |
| LCW0404_066_ | GSSPSASTGTGPGSSP | GGTTCTAGCCCTTCTGCATCCACCGGTACCGGCCCAGGTT |
| GFP-N_H11.ab1 | SASTGTGPGASPGTSS | CTAGCCCGTCTGCTTCTACCGGTACTGGTCCAGGTGCTTC |
| | TGSP | TCCGGGTACTAGCTCTACTGGTTCTCCA |
| LCW0404_067_ | GTPGSGTASSSPGSST | GGTACCCCGGGTAGCGGTACCGCTTCTTCTTCTCCAGGTA |
| GFP-N_A12.ab1 | PSGATGSPGSNPSAST | GCTCTACTCCGTCTGGTGCTACCGGCTCTCCAGGTTCTAA |
| | GTGP | CCCTTCTGCATCCACCGGTACCGGCCCA |
| LCW0404_068_ | GSSPSASTGTGPGSST | GGTTCTAGCCCTTCTGCATCTACTGGTACTGGCCCAGGTA |
| GFP-N_B12.ab1 | PSGATGSPGASPGTSS | GCTCTACTCCTTCTGGTGCTACCGGCTCTCCAGGTGCTTCT |
| | TGSP | CCGGGTACTAGCTCTACCGGTTCTCCA |
| LCW0404_069_ | GSSTPSGATGSPGASP | GGTAGCTCTACCCCTTCTGGTGCAACCGGCTCTCCAGGTG |
| GFP-N_C12.ab1 | GTSSTGSPGTPGSGTA | CATCCCCGGGTACCAGCTCTACCGGTTCTCCAGGTACTCC |
| | SSSP | GGGTAGCGGTACCGCTTCTTCCTCTCCA |
| LCW0404_070_ | GSSTPSGATGSPGSST | GGTAGCTCTACTCCGTCTGGTGCAACCGGTTCCCCAGGTA |
| GFP-N_D12.ab1 | PSGATGSPGSSTPSGA | GCTCTACCCCTTCTGGTGCAACCGGCTCCCCAGGTAGCTC |
| | TGSP | TACCCCTTCTGGTGCAACTGGCTCTCCA |
| LCW0404_073_ | GASPGTSSTGSPGTPG | GGTGCTTCTCCTGGCACTAGCTCTACCGGTTCTCCAGGTA |
| GFP-N_E12.ab1 | SGTASSSPGSSTPSGA | CCCCTGGTAGCGGTACCGCATCTTCCTCTCCAGGTAGCTC |
| | TGSP | TACTCCTTCTGGTGCTACTGGTTCCCCA |
| LCW0404_075_ | GSSTPSGATGSPGSSP | GGTAGCTCTACCCCGTCTGGTGCTACTGGCTCCCCAGGTT |
| GFP-N_F12.ab1 | SASTGTGPGSSPSAST | CTAGCCCTTCTGCATCCACCGGTACCGGTCCAGGTTCTAG |
| | GTGP | CCCGTCTGCATCTACTGGTACTGGTCCA |
| LCW0404_080_ | GASPGTSSTGSPGSSP | GGTGCTTCCCCGGGCACCAGCTCTACTGGTTCTCCAGGTT |
| GFP-N_G12.ab1 | SASTGTGPGSSPSAST | CTAGCCCGTCTGCTTCTACTGGTACTGGTCCAGGTTCTAG |
| | GTGP | CCCTTCTGCTTCCACTGGTACTGGTCCA |
| LCW0404_081_ | GASPGTSSTGSPGSSP | GGTGCTTCCCCGGGTACCAGCTCTACCGGTTCTCCAGGTT |
| GFP-N_H12.ab1 | SASTGTGPGTPGSGT | CTAGCCCTTCTGCTTCTACCGGTACCGGTCCAGGTACCCC |
| | ASSSP | TGGCAGCGGTACCGCATCTTCCTCTCCA |

### Example 5: Construction of XTEN_AE864

[0340] XTEN_AE864 was constructed from serial dimerization of XTEN_AE36 to AE72, 144, 288, 576 and 864. A collection of XTEN_AE72 segments was constructed from 37 different segments of XTEN_AE36. Cultures of E. coli harboring all 37 different 36-amino acid segments were mixed and plasmids were isolated. This plasmid pool was digested with BsaI/NcoI to generate the small fragment as the insert. The same plasmid pool was digested with BbsI/NcoI to generate the large fragment as the vector. The insert and vector fragments were ligated resulting in a doubling of the length and the ligation mixture was transformed into BL21Gold(DE3) cells to obtain colonies of XTEN_AE72.

[0341] This library of XTEN_AE72 segments was designated LCW0406. All clones from LCW0406 were combined and dimerized again using the same process as described above yielding library LCW0410 of XTEN_AE144. All clones from LCW0410 were combined and dimerized again using the same process as described above yielding library LCW0414 of XTEN_AE288. Two isolates LCW0414.001 and LCW0414.002 were randomly picked from the library and sequenced to verify the identities. All clones from LCW0414 were combined and dimerized again using the same process as described above yielding library LCW0418 of XTEN_AE576. We screened 96 isolates from library LCW0418 for high level of GFP fluorescence. 8 isolates with right sizes of inserts by PCR and strong fluorescence were sequenced and 2 isolates (LCW0418.018 and LCW0418.052) were chosen for future use based on sequencing and expression data.

[0342] The specific clone pCW0432 of XTEN_AE864 was constructed by combining LCW0418.018 of XTEN_AE576 and LCW0414.002 of XTEN_AE288 using the same dimerization process as described above.

### Example 6: Construction of XTEN_AM144

[0343] A collection of XTEN_AM144 segments was constructed starting from 37 different segments of XTEN_AE36, 44 segments of XTEN_AF36, and 44 segments of XTEN_AG36.

[0344] Cultures of E. coli harboring all 125 different 36-amino acid segments were mixed and plasmids were isolated. This plasmid pool was digested with BsaI/NcoI to generate the small fragment as the insert. The same plasmid pool was digested with BbsI/NcoI to generate the large fragment as the vector. The insert and vector fragments were ligated resulting in a doubling of the length and the ligation mixture was transformed into BL21Gold(DE3) cells to obtain colonies of XTEN_AM72.

[0345] This library of XTEN_AM72 segments was designated LCW0461. All clones from LCW0461 were combined and dimerized again using the same process as described above yielding library LCW0462. 1512 Isolates from library LCW0462 were screened for protein expression. Individual colonies were transferred into 96 well plates and cultured overnight as starter cultures. These starter cultures were diluted into fresh autoinduction medium and cultured for 20-30 h. Expression was measured using a fluorescence plate reader with excitation at 395 nm and emission at 510 nm. 192 isolates showed high level expression and were submitted to DNA sequencing. Most clones in library LCW0462 showed good expression and similar physicochemical properties suggesting that most combinations of XTEN_AM36 segments yield useful XTEN sequences. 30 isolates from LCW0462 were chosen as a preferred collection of XTEN_AM144 segments for the construction of multifunctional proteins that contain multiple XTEN segments. The file names of the nucleotide and amino acid constructs for these segments are listed in Table 12.

TABLE 12
DNA and amino acid sequences for AM144 segments (SEQ ID NOS 607-672,
respectively, in order of appearance)

| Clone | DNA Sequence | Protein Sequence |
|---|---|---|
| LCW462_r1 | GGTACCCCGGGCAGCGGTACCGCATCTTCCTCTCCAGGTA | GTPGSGTASSSPGSSTPS |
| | GCTCTACCCCGTCTGGTGCTACCGGTTCCCCAGGTAGCTC | GATGSPGSSTPSGATGS |
| | TACCCCGTCTGGTGCAACCGGCTCCCCAGGTAGCCCGGCT | PGSPAGSPTSTEEGTSES |
| | GGCTCTCCTACCTCTACTGAGGAAGGTACTTCTGAAAGCG | ATPESGPGTSTEPSEGS |
| | CTACTCCTGAGTCTGGTCCAGGTACCTCTACTGAACCGTC | APGSSPSASTGTGPGSS |
| | CGAAGGTAGCGCTCCAGGTTCTAGCCCTTCTGCATCCACC | PSASTGTGPGASPGTSS |
| | GGTACCGGCCCAGGTTCTAGCCCGTCTGCTTCTACCGGTA | TGSPGTSTEPSEGSAPG |
| | CTGGTCCAGGTGCTTCTCCGGGTACTAGCTCTACTGGTTC | TSTEPSEGSAPGSEPATS |
| | TCCAGGTACCTCTACCGAACCGTCCGAGGGTAGCGCACC | GSETP |
| | AGGTACCTCTACTGAACCGTCTGAGGGTAGCGCTCCAGG | |
| | TAGCGAACCGGCAACCTCCGGTTCTGAAACTCCA | |
| LCW462_r5 | GGTTCTACCAGCGAATCCCCTTCTGGCACTGCACCAGGTT | GSTSESPSGTAPGSTSES |
| | CTACTAGCGAATCCCCTTCTGGTACCGCACCAGGTACTTC | PSGTAPGTSPSGESSTAP |
| | TCCGAGCGGCGAATCTTCTACTGCTCCAGGTACCTCTACT | GTSTEPSEGSAPGTSTEP |
| | GAACCTTCCGAAGGCAGCGCTCCAGGTACCTCTACCGAA | SEGSAPGTSESATPESG |
| | CCGTCCGAGGGCAGCGCACCAGGTACTTCTGAAAGCGCA | PGASPGTSSTGSPGSSTP |
| | ACCCCTGAATCCGGTCCAGGTGCATCTCCTGGTACCAGCT | SGATGSPGASPGTSSTG |
| | CTACCGGTTCTCCAGGTAGCTCTACTCCTTCTGGTGCTAC | SPGSTSESPSGTAPGSTS |
| | TGGCTCTCCAGGTGCTTCCCCGGGTACCAGCTCTACCGGT | ESPSGTAPGTSTPESGS |
| | TCTCCAGGTTCTACTAGCGAATCTCCTTCTGGCACTGCAC | ASP |
| | CAGGTTCTACCAGCGAATCTCCGTCTGGCACTGCACCAGG | |
| | TACCTCTACCCCTGAAAGCGGTTCCGCTTCTCCA | |
| LCW462_r9 | GGTACTTCTACCGAACCTTCCGAGGGCAGCGCACCAGGT | GTSTEPSEGSAPGTSES |
| | ACTTCTGAAAGCGCTACCCCTGAGTCCGGCCCAGGTACTT | ATPESGPGTSESATPES |
| | CTGAAAGCGCTACTCCTGAATCCGGTCCAGGTACCTCTAC | GPGTSTEPSEGSAPGTS |
| | TGAACCTTCTGAGGGCAGCGCTCCAGGTACTTCTGAAAG | ESATPESGPGTSTEPSEG |
| | CGCTACCCCGGAGTCCGGTCCAGGTACTTCTACTGAACCG | SAPGTSTEPSEGSAPGS |
| | TCCGAAGGTAGCGCACCAGGTACTTCTACTGAACCTTCCG | EPATSGSETPGSPAGSP |
| | AAGGTAGCGCTCCAGGTAGCGAACCTGCTACTTCTGGTTC | TSTEEGASPGTSSTGSP |
| | TGAAACCCCAGGTAGCCCGGCTGGCTCTCCGACCTCCACC | GSSPSASTGTGPGSSPS |
| | GAGGAAGGTGCTTCTCCTGGCACCAGCTCTACTGGTTCTC | ASTGTGP |
| | CAGGTTCTAGCCCTTCTGCTTCTACCGGTACTGGTCCAGG | |
| | TTCTAGCCCTTCTGCATCCACTGGTACTGGTCCA | |
| LCW462_r10 | GGTAGCGAACCGGCAACCTCTGGCTCTGAAACCCCAGGT | GSEPATSGSETPGTSES |
| | ACCTCTGAAAGCGCTACTCCGGAATCTGGTCCAGGTACTT | ATPESGPGTSESATPES |
| | CTGAAAGCGCTACTCCGGAATCCGGTCCAGGTTCTACCA | GPGSTSESPSGTAPGSTS |
| | GCGAATCTCCTTCTGGCACCGCTCCAGGTTCTACTAGCGA | ESPSGTAPGTSPSGESST |
| | ATCCCCGTCTGGTACCGCACCAGGTACTTCTCCTAGCGGC | APGASPGTSSTGSPGSS |
| | GAATCTTCTACCGCACCAGGTGCATCTCCGGGTACTAGCT | PSASTGTGPGSSTPSGA |
| | CTACCGGTTCTCCAGGTTCTAGCCCTTCTGCTTCCACTGGT | TGSPGSSTPSGATGSPG |
| | ACCGGCCCAGGTAGCTCTACCCCGTCTGGTGCTACTGGTT | SSTPSGATGSPGASPGT |
| | CCCCAGGTAGCTCTACTCCGTCTGGTGCAACCGGTTCCCC | SSTGSP |
| | AGGTAGCTCTACTCCTTCTGGTGCTACTGGCTCCCCAGGT | |
| | GCATCCCCTGGCACCAGCTCTACCGGTTCTCCA | |
| LCW462_r15 | GGTGCTTCTCCGGGCACCAGCTCTACTGGTTCTCCAGGTT | GASPGTSSTGSPGSSPS |
| | CTAGCCCTTCTGCATCCACCGGTACCGGTCCAGGTAGCTC | ASTGTGPGSSTPSGATG |
| | TACCCCTTCTGGTGCAACCGGCTCTCCAGGTACTTCTGAA | SPGTSESATPESGPGSEP |
| | AGCGCTACCCCGGAATCTGGCCCAGGTAGCGAACCGGCT | ATSGSETPGSEPATSGS |
| | ACTTCTGGTTCTGAAACCCCAGGTAGCGAACCGGCTACCT | ETPGTSESATPESGPGTS |
| | CCGGTTCTGAAACTCCAGGTACTTCTGAAAGCGCTACTCC | TEPSEGSAPGTSTEPSEG |
| | GGAGTCCGGTCCAGGTACCTCTACCGAACCGTCCGAAGG | SAPGTSTEPSEGSAPGT |
| | CAGCGCTCCAGGTACTTCTACTGAACCTTCTGAGGGTAGC | STEPSEGSAPGSEPATS |
| | GCTCCAGGTACCTCTACCGAACCGTCCGAGGGTAGCGCA | GSETP |
| | CCAGGTACCTCTACTGAACCGTCTGAGGGTAGCGCTCCA | |
| | GGTAGCGAACCGGCAACCTCCGGTTCTGAAACTCCA | |
| LCW462_r16 | GGTACCTCTACCGAACCTTCCGAAGGTAGCGCTCCAGGT | GTSTEPSEGSAPGSPAG |
| | AGCCCGGCAGGTTCTCCTACTTCCACTGAGGAAGGTACTT | SPTSTEEGTSTEPSEGSA |
| | CTACCGAACCTTCTGAGGGTAGCGCACCAGGTACCTCTG | PGTSESATPESGPGSEP |
| | AAAGCGCAACTCCTGAGTCTGGCCCAGGTAGCGAACCTG | ATSGSETPGTSESATPES |
| | CTACCTCCGGCTCTGAGACTCCAGGTACCTCTGAAAGCGC | GPGSPAGSPTSTEEGTS |
| | AACCCCGGAATCTGGTCCAGGTAGCCCGGCTGGCTCTCCT | ESATPESGPGTSTEPSEG |
| | ACCTCTACTGAGGAAGGTACTTCTGAAAGCGCTACTCCTG | SAPGSEPATSGSETPGT |
| | AGTCTGGTCCAGGTACCTCTACTGAACCGTCCGAAGGTA | STEPSEGSAPGSEPATS |
| | GCGCTCCAGGTAGCGAACCTGCTACTTCTGGTTCTGAAAC | GSETP |
| | TCCAGGTACTTCTACCGAACCGTCCGAGGGTAGCGCTCCA | |
| | GGTAGCGAACCTGCTACTTCTGGTTCTGAAACTCCA | |
| LCW462_r20 | GGTACTTCTACCGAACCGTCCGAAGGCAGCGCTCCAGGT | GTSTEPSEGSAPGTSTEP |
| | ACCTCTACTGAACCTTCCGAGGGCAGCGCTCCAGGTACCT | SEGSAPGTSTEPSEGSA |
| | CTACCGAACCTTCTGAAGGTAGCGCACCAGGTACTTCTAC | PGTSTEPSEGSAPGTSTE |
| | CGAACCGTCCGAAGGCAGCGCTCCAGGTACCTCTACTGA | PSEGSAPGTSTEPSEGS |
| | ACCTTCCGAGGGCAGCGCTCCAGGTACCTCTACCGAACCT | APGTSTEPSEGSAPGTS |
| | TCTGAAGGTAGCGCACCAGGTACTTCTACCGAACCTTCCG | ESATPESGPGTSESATPE |
| | AGGGCAGCGCACCAGGTACTTCTGAAAGCGCTACCCCTG | SGPGTSTEPSEGSAPGS |
| | AGTCCGGCCCAGGTACTTCTGAAAGCGCTACTCCTGAATC | EPATSGSETPGSPAGSP |
| | CGGTCCAGGTACTTCTACTGAACCTTCCGAAGGTAGCGCT | TSTEE |
| | CCAGGTAGCGAACCTGCTACTTCTGGTTCTGAAACCCCAG | |
| | GTAGCCCGGCTGGCTCTCCGACCTCCACCGAGGAA | |
| LCW462_r23 | GGTACTTCTACCGAACCGTCCGAGGGCAGCGCTCCAGGT | GTSTEPSEGSAPGTSTEP |
| | ACTTCTACTGAACCTTCTGAAGGCAGCGCTCCAGGTACTT | SEGSAPGTSTEPSEGSA |
| | CTACTGAACCTTCCGAAGGTAGCGCACCAGGTTCTACCA | PGSTSESPSGTAPGSTSE |
| | GCGAATCCCCTTCTGGTACTGCTCCAGGTTCTACCAGCGA | SPSGTAPGTSTPESGSAS |
| | ATCCCCTTCTGGCACCGCACCAGGTACTTCTACCCCTGAA | PGSEPATSGSETPGTSES |
| | AGCGGCTCCGCTTCTCCAGGTAGCGAACCTGCAACCTCTG | ATPESGPGTSTEPSEGS |
| | GCTCTGAAACCCCAGGTACCTCTGAAAGCGCTACTCCTGA | APGTSTEPSEGSAPGTS |
| | ATCTGGCCCAGGTACTTCTACTGAACCGTCCGAGGGCAG | ESATPESGPGTSESATPE |
| | CGCACCAGGTACTTCTACTGAACCGTCTGAAGGTAGCGC | SGP |
| | ACCAGGTACTTCTGAAAGCGCAACCCCGGAATCCGGCCC | |
| | AGGTACCTCTGAAAGCGCAACCCCGGAGTCCGGCCCA | |
| LCW462_r24 | GGTAGCTCTACCCCTTCTGGTGCTACCGGCTCTCCAGGTT | GSSTPSGATGSPGSSPS |
| | CTAGCCCGTCTGCTTCTACCGGTACCGGTCCAGGTAGCTC | ASTGTGPGSSTPSGATG |
| | TACCCCTTCTGGTGCTACTGGTTCTCCAGGTAGCCCTGCT | SPGSPAGSPTSTEEGSPA |
| | GGCTCTCCGACTTCTACTGAGGAAGGTAGCCCGGCTGGTT | GSPTSTEEGTSTEPSEGS |
| | CTCCGACTTCTACTGAGGAAGGTACTTCTACCGAACCTTC | APGASPGTSSTGSPGSS |
| | CGAAGGTAGCGCTCCAGGTGCTTCCCCGGGCACTAGCTCT | PSASTGTGPGTPGSGTA |
| | ACCGGTTCTCCAGGTTCTAGCCCTTCTGCATCTACTGGTA | SSSPGSTSSTAESPGPGT |
| | CTGGCCCAGGTACTCCGGGCAGCGGTACTGCTTCTTCCTC | SPSGESSTAPGTSTPESG |
| | TCCAGGTTCTACTAGCTCTACTGCTGAATCTCCTGGCCCA | SASP |
| | GGTACTTCTCCTAGCGGTGAATCTTCTACCGCTCCAGGTA | |
| | CCTCTACTCCGGAAAGCGGTTCTGCATCTCCA | |
| LCW462_r27 | GGTACCTCTACTGAACCTTCTGAGGGCAGCGCTCCAGGTA | GTSTEPSEGSAPGTSES |
| | CTTCTGAAAGCGCTACCCCGGAGTCCGGTCCAGGTACTTC | ATPESGPGTSTEPSEGS |
| | TACTGAACCGTCCGAAGGTAGCGCACCAGGTACTTCTACT | APGTSTEPSEGSAPGTS |
| | GAACCGTCTGAAGGTAGCGCACCAGGTACTTCTGAAAGC | ESATPESGPGTSESATPE |
| | GCAACCCCGGAATCCGGCCCAGGTACCTCTGAAAGCGCA | SGPGTPGSGTASSSPGA |
| | ACCCCGGAGTCCGGCCCAGGTACTCCTGGCAGCGGTACC | SPGTSSTGSPGASPGTSS |
| | GCTTCTTCTTCTCCAGGTGCTTCTCCTGGTACTAGCTCTAC | TGSPGSPAGSPTSTEEG |
| | TGGTTCTCCAGGTGCTTCTCCGGGCACTAGCTCTACTGGT | SPAGSPTSTEEGTSTEPS |
| | TCTCCAGGTAGCCCTGCTGGCTCTCCGACTTCTACTGAGG | EGSAP |
| | AAGGTAGCCCGGCTGGTTCTCCGACTTCTACTGAGGAAG | |
| | GTACTTCTACCGAACCTTCCGAAGGTAGCGCTCCA | |
| LCW462_r28 | GGTAGCCCAGCAGGCTCTCCGACTTCCACTGAGGAAGGT | GSPAGSPTSTEEGTSTEP |
| | ACTTCTACTGAACCTTCCGAAGGCAGCGCACCAGGTACCT | SEGSAPGTSTEPSEGSA |
| | CTACTGAACCTTCTGAGGGCAGCGCTCCAGGTACCTCTAC | PGTSTEPSEGSAPGTSES |
| | CGAACCGTCTGAAGGTAGCGCACCAGGTACCTCTGAAAG | ATPESGPGTSESATPES |
| | CGCAACTCCTGAGTCCGGTCCAGGTACTTCTGAAAGCGC | GPGTPGSGTASSSPGSS |
| | AACCCCGGAGTCTGGCCCAGGTACCCCGGGTAGCGGTAC | TPSGATGSPGASPGTSS |
| | TGCTTCTTCCTCTCCAGGTAGCTCTACCCCTTCTGGTGCAA | TGSPGTSTEPSEGSAPG |
| | CCGGCTCTCCAGGTGCTTCTCCGGGCACCAGCTCTACCGG | TSESATPESGPGTSTEPS |
| | TTCTCCAGGTACCTCTACTGAACCTTCTGAGGGCAGCGCT | EGSAP |
| | CCAGGTACTTCTGAAAGCGCTACCCCGGAGTCCGGTCCA | |
| | GGTACTTCTACTGAACCGTCCGAAGGTAGCGCACCA | |
| LCW462_r38 | GGTAGCGAACCGGCAACCTCCGGCTCTGAAACTCCAGGT | GSEPATSGSETPGTSES |
| | ACTTCTGAAAGCGCTACTCCGGAATCCGGCCCAGGTAGC | ATPESGPGSEPATSGSE |
| | GAACCGGCTACTTCCGGCTCTGAAACCCCAGGTAGCTCTA | TPGSSTPSGATGSPGTP |
| | CCCCGTCTGGTGCAACCGGCTCCCCAGGTACTCCTGGTAG | GSGTASSSPGSSTPSGA |
| | CGGTACCGCTTCTTCTTCTCCAGGTAGCTCTACTCCGTCTG | TGSPGASPGTSSTGSPG |
| | GTGCTACCGGCTCCCCAGGTGCATCTCCTGGTACCAGCTC | SSTPSGATGSPGASPGT |
| | TACCGGTTCTCCAGGTAGCTCTACTCCTTCTGGTGCTACT | SSTGSPGSEPATSGSETP |
| | GGCTCTCCAGGTGCTTCCCCGGGTACCAGCTCTACCGGTT | GTSTEPSEGSAPGSEPA |
| | CTCCAGGTAGCGAACCTGCTACTTCTGGTTCTGAAACTCC | TSGSETP |
| | AGGTACTTCTACCGAACCGTCCGAGGGTAGCGCTCCAGG | |
| | TAGCGAACCTGCTACTTCTGGTTCTGAAACTCCA | |
| LCW462_r39 | GGTACCTCTACTGAACCTTCCGAAGGCAGCGCTCCAGGT | GTSTEPSEGSAPGTSTEP |
| | ACCTCTACCGAACCGTCCGAGGGCAGCGCACCAGGTACT | SEGSAPGTSESATPESG |
| | TCTGAAAGCGCAACCCCTGAATCCGGTCCAGGTAGCCCT | PGSPAGSPTSTEEGSPA |
| | GCTGGCTCTCCGACTTCTACTGAGGAAGGTAGCCCGGCTG | GSPTSTEEGTSTEPSEGS |
| | GTTCTCCGACTTCTACTGAGGAAGGTACTTCTACCGAACC | APGSPAGSPTSTEEGTS |
| | TTCCGAAGGTAGCGCTCCAGGTAGCCCGGCTGGTTCTCCG | TEPSEGSAPGTSTEPSEG |
| | ACTTCCACCGAGGAAGGTACCTCTACTGAACCTTCTGAGG | SAPGASPGTSSTGSPGS |
| | GTAGCGCTCCAGGTACCTCTACTGAACCTTCCGAAGGCA | SPSASTGTGPGSSPSAST |
| | GCGCTCCAGGTGCTTCCCCGGGCACCAGCTCTACTGGTTC | GTGP |
| | TCCAGGTTCTAGCCCGTCTGCTTCTACTGGTACTGGTCCA | |
| | GGTTCTAGCCCTTCTGCTTCCACTGGTACTGGTCCA | |
| LCW462_r41 | GGTAGCTCTACCCCGTCTGGTGCTACCGGTTCCCCAGGTG | GSSTPSGATGSPGASPG |
| | CTTCTCCTGGTACTAGCTCTACCGGTTCTCCAGGTAGCTC | TSSTGSPGSSTPSGATGS |
| | TACCCCGTCTGGTGCTACTGGCTCTCCAGGTAGCCCTGCT | PGSPAGSPTSTEEGTSES |
| | GGCTCTCCAACCTCCACCGAAGAAGGTACCTCTGAAAGC | ATPESGPGSEPATSGSE |
| | GCAACCCCTGAATCCGGCCCAGGTAGCGAACCGGCAACC | TPGASPGTSSTGSPGSST |
| | TCCGGTTCTGAAACCCCAGGTGCATCTCCTGGTACTAGCT | PSGATGSPGSSPSASTG |
| | CTACTGGTTCTCCAGGTAGCTCTACTCCGTCTGGTGCAAC | TGPGSTSESPSGTAPGS |
| | CGGCTCTCCAGGTTCTAGCCCTTCTGCATCTACCGGTACT | TSESPSGTAPGTSTPESG |
| | GGTCCAGGTTCTACCAGCGAATCCCCTTCTGGTACTGCTC | SASP |
| | CAGGTTCTACCAGCGAATCCCCTTCTGGCACCGCACCAGG | |
| | TACTTCTACCCCTGAAAGCGGCTCCGCTTCTCCA | |
| LCW462_T42 | GGTTCTACCAGCGAATCTCCTTCTGGCACCGCTCCAGGTT | GSTSESPSGTAPGSTSES |
| | CTACTAGCGAATCCCCGTCTGGTACCGCACCAGGTACTTC | PSGTAPGTSPSGESSTAP |
| | TCCTAGCGGCGAATCTTCTACCGCACCAGGTACCTCTGAA | GTSESATPESGPGTSTEP |
| | AGCGCTACTCCGGAGTCTGGCCCAGGTACCTCTACTGAAC | SEGSAPGTSTEPSEGSA |
| | CGTCTGAGGGTAGCGCTCCAGGTACTTCTACTGAACCGTC | PGTSTEPSEGSAPGTSES |
| | CGAAGGTAGCGCACCAGGTACCTCTACTGAACCTTCTGA | ATPESGPGTSTEPSEGS |
| | GGGCAGCGCTCCAGGTACTTCTGAAAGCGCTACCCCGGA | APGSSTPSGATGSPGAS |
| | GTCCGGTCCAGGTACTTCTACTGAACCGTCCGAAGGTAGC | PGTSSTGSPGSSTPSGAT |
| | GCACCAGGTAGCTCTACCCCGTCTGGTGCTACCGGTTCCC | GSP |
| | CAGGTGCTTCTCCTGGTACTAGCTCTACCGGTTCTCCAGG | |
| | TAGCTCTACCCCGTCTGGTGCTACTGGCTCTCCA | |
| LCW462_T43 | GGTTCTACTAGCTCTACTGCAGAATCTCCGGGCCCAGGTA | GSTSSTAESPGPGTSPSG |
| | CCTCTCCTAGCGGTGAATCTTCTACCGCTCCAGGTACTTC | ESSTAPGTSPSGESSTAP |
| | TCCGAGCGGTGAATCTTCTACCGCTCCAGGTTCTACTAGC | GSTSSTAESPGPGSTSST |
| | TCTACCGCTGAATCTCCGGGTCCAGGTTCTACCAGCTCTA | AESPGPGTSTPESGSASP |
| | CTGCAGAATCTCCTGGCCCAGGTACTTCTACTCCGGAAAG | GTSPSGESSTAPGSTSST |
| | CGGTTCCGCTTCTCCAGGTACTTCTCCTAGCGGTGAATCT | AESPGPGTSTPESGSASP |
| | TCTACCGCTCCAGGTTCTACCAGCTCTACTGCTGAATCTC | GSTSSTAESPGPGSTSES |
| | CTGGCCCAGGTACTTCTACCCCGGAAAGCGGCTCCGCTTC | PSGTAPGTSPSGESSTAP |
| | TCCAGGTTCTACCAGCTCTACCGCTGAATCTCCTGGCCCA | |
| | GGTTCTACTAGCGAATCTCCGTCTGGCACCGCACCAGGTA | |
| | CTTCCCCTAGCGGTGAATCTTCTACTGCACCA | |
| LCW462_T45 | GGTACCTCTACTCCGGAAAGCGGTTCCGCATCTCCAGGTT | GTSTPESGSASPGSTSES |
| | CTACCAGCGAATCCCCGTCTGGCACCGCACCAGGTTCTAC | PSGTAPGSTSSTAESPGP |
| | TAGCTCTACTGCTGAATCTCCGGGCCCAGGTACCTCTACT | GTSTEPSEGSAPGTSTEP |
| | GAACCTTCCGAAGGCAGCGCTCCAGGTACCTCTACCGAA | SEGSAPGTSESATPESG |
| | CCGTCCGAGGGCAGCGCACCAGGTACTTCTGAAAGCGCA | PGTSESATPESGPGTSTE |
| | ACCCCTGAATCCGGTCCAGGTACCTCTGAAAGCGCTACTC | PSEGSAPGTSTEPSEGS |
| | CGGAGTCTGGCCCAGGTACCTCTACTGAACCGTCTGAGG | APGTSESATPESGPGTS |
| | GTAGCGCTCCAGGTACTTCTACTGAACCGTCCGAAGGTA | TEPSEGSAPGTSTEPSEG |
| | GCGCACCAGGTACTTCTGAAAGCGCTACTCCGGAGTCCG | SAP |
| | GTCCAGGTACCTCTACCGAACCGTCCGAAGGCAGCGCTC | |
| | CAGGTACTTCTACTGAACCTTCTGAGGGTAGCGCTCCC | |
| LCW462_T47 | GGTACCTCTACCGAACCGTCCGAGGGTAGCGCACCAGGT | GTSTEPSEGSAPGTSTEP |
| | ACCTCTACTGAACCGTCTGAGGGTAGCGCTCCAGGTAGC | SEGSAPGSEPATSGSET |
| | GAACCGGCAACCTCCGGTTCTGAAACTCCAGGTACTTCTA | PGTSTEPSEGSAPGTSES |
| | CTGAACCGTCTGAAGGTAGCGCACCAGGTACTTCTGAAA | ATPESGPGTSESATPES |
| | GCGCAACCCCGGAATCCGGCCCAGGTACCTCTGAAAGCG | GPGASPGTSSTGSPGSS |
| | CAACCCCGGAGTCCGGCCCAGGTGCATCTCCGGGTACTA | PSASTGTGPGSSTPSGA |
| | GCTCTACCGGTTCTCCAGGTTCTAGCCCTTCTGCTTCCACT | TGSPGSSTPSGATGSPG |
| | GGTACCGGCCCAGGTAGCTCTACCCCGTCTGGTGCTACTG | SSTPSGATGSPGASPGT |
| | GTTCCCCAGGTAGCTCTACTCCGTCTGGTGCAACCGGTTC | SSTGSP |
| | CCCAGGTAGCTCTACTCCTTCTGGTGCTACTGGCTCCCCA | |
| | GGTGCATCCCCTGGCACCAGCTCTACCGGTTCTCCA | |
| LCW462_r54 | GGTAGCGAACCGGCAACCTCTGGCTCTGAAACTCCAGGT | GSEPATSGSETPGSEPA |
| | AGCGAACCTGCAACCTCCGGCTCTGAAACCCCAGGTACT | TSGSETPGTSTEPSEGSA |
| | TCTACTGAACCTTCTGAGGGCAGCGCACCAGGTAGCGAA | PGSEPATSGSETPGTSES |
| | CCTGCAACCTCTGGCTCTGAAACCCCAGGTACCTCTGAAA | ATPESGPGTSTEPSEGS |
| | GCGCTACTCCTGAATCTGGCCCAGGTACTTCTACTGAACC | APGSSTPSGATGSPGSS |
| | GTCCGAGGGCAGCGCACCAGGTAGCTCTACTCCGTCTGG | TPSGATGSPGASPGTSS |
| | TGCTACCGGCTCTCCAGGTAGCTCTACCCCTTCTGGTGCA | TGSPGSSTPSGATGSPG |
| | ACCGGCTCCCCAGGTGCTTCTCCGGGTACCAGCTCTACTG | ASPGTSSTGSPGSSTPSG |
| | GTTCTCCAGGTAGCTCTACCCCGTCTGGTGCTACCGGTTC | ATGSP |
| | CCCAGGTGCTTCTCCTGGTACTAGCTCTACCGGTTCTCCA | |
| | GGTAGCTCTACCCCGTCTGGTGCTACTGGCTCTCCA | |
| LCW462_r55 | GGTACTTCTACCGAACCGTCCGAGGGCAGCGCTCCAGGT | GTSTEPSEGSAPGTSTEP |
| | ACTTCTACTGAACCTTCTGAAGGCAGCGCTCCAGGTACTT | SEGSAPGTSTEPSEGSA |
| | CTACTGAACCTTCCGAAGGTAGCGCACCAGGTACTTCTGA | PGTSESATPESGPGTSTE |
| | AAGCGCTACTCCGGAGTCCGGTCCAGGTACCTCTACCGA | PSEGSAPGTSTEPSEGS |
| | ACCGTCCGAAGGCAGCGCTCCAGGTACTTCTACTGAACCT | APGSTSESPSGTAPGTSP |
| | TCTGAGGGTAGCGCTCCAGGTTCTACTAGCGAATCTCCGT | SGESSTAPGTSPSGESST |
| | CTGGCACTGCTCCAGGTACTTCTCCTAGCGGTGAATCTTC | APGSPAGSPTSTEEGTS |
| | TACCGCTCCAGGTACTTCCCCTAGCGGCGAATCTTCTACC | ESATPESGPGTSTEPSEG |
| | GCTCCAGGTAGCCCGGCTGGCTCTCCTACCTCTACTGAGG | SAP |
| | AAGGTACTTCTGAAAGCGCTACTCCTGAGTCTGGTCCAGG | |
| | TACCTCTACTGAACCGTCCGAAGGTAGCGCTCCA | |
| LCW462_r57 | GGTACTTCTACTGAACCTTCCGAAGGTAGCGCTCCAGGTA | GTSTEPSEGSAPGSEPA |
| | GCGAACCTGCTACTTCTGGTTCTGAAACCCCAGGTAGCCC | TSGSETPGSPAGSPTSTE |
| | GGCTGGCTCTCCGACCTCCACCGAGGAAGGTAGCCCGGC | EGSPAGSPTSTEEGTSES |
| | AGGCTCTCCGACCTCTACTGAGGAAGGTACTTCTGAAAG | ATPESGPGTSTEPSEGS |
| | CGCAACCCCGGAGTCCGGCCCAGGTACCTCTACCGAACC | APGTSTEPSEGSAPGTS |
| | GTCTGAGGGCAGCGCACCAGGTACCTCTACTGAACCTTCC | TEPSEGSAPGTSESATPE |
| | GAAGGCAGCGCTCCAGGTACCTCTACCGAACCGTCCGAG | SGPGSSTPSGATGSPGS |
| | GGCAGCGCACCAGGTACTTCTGAAAGCGCAACCCCTGAA | SPSASTGTGPGASPGTS |
| | TCCGGTCCAGGTAGCTCTACTCCGTCTGGTGCAACCGGCT | STGSP |
| | CCCCAGGTTCTAGCCCGTCTGCTTCCACTGGTACTGGCCC | |
| | AGGTGCTTCCCCGGGCACCAGCTCTACTGGTTCTCCA | |
| LCW462_r61 | GGTAGCGAACCGGCTACTTCCGGCTCTGAGACTCCAGGT | GSEPATSGSETPGSPAG |
| | AGCCCTGCTGGCTCTCCGACCTCTACCGAAGAAGGTACCT | SPTSTEEGTSESATPESG |
| | CTGAAAGCGCTACCCCTGAGTCTGGCCCAGGTACCTCTAC | PGTSTEPSEGSAPGTSTE |
| | TGAACCTTCCGAAGGCAGCGCTCCAGGTACCTCTACCGA | PSEGSAPGTSESATPES |
| | ACCGTCCGAGGGCAGCGCACCAGGTACTTCTGAAAGCGC | GPGTSTPESGSASPGSTS |
| | AACCCCTGAATCCGGTCCAGGTACCTCTACTCCGGAAAG | ESPSGTAPGSTSSTAESP |
| | CGGTTCCGCATCTCCAGGTTCTACCAGCGAATCCCCGTCT | GPGTSESATPESGPGTS |
| | GGCACCGCACCAGGTTCTACTAGCTCTACTGCTGAATCTC | TEPSEGSAPGTSTEPSEG |
| | CGGGCCCAGGTACTTCTGAAAGCGCTACTCCGGAGTCCG | SAP |
| | GTCCAGGTACCTCTACCGAACCGTCCGAAGGCAGCGCTC | |
| | CAGGTACTTCTACTGAACCTTCTGAGGGTAGCGCTCCA | |
| LCW462_r64 | GGTACTTCTACCGAACCGTCCGAGGGCAGCGCTCCAGGT | GTSTEPSEGSAPGTSTEP |
| | ACTTCTACTGAACCTTCTGAAGGCAGCGCTCCAGGTACTT | SEGSAPGTSTEPSEGSA |
| | CTACTGAACCTTCCGAAGGTAGCGCACCAGGTACCTCTAC | PGTSTEPSEGSAPGTSES |
| | CGAACCGTCTGAAGGTAGCGCACCAGGTACCTCTGAAAG | ATPESGPGTSESATPES |
| | CGCAACTCCTGAGTCCGGTCCAGGTACTTCTGAAAGCGC | GPGTPGSGTASSSPGSS |
| | AACCCCGGAGTCTGGCCCAGGTACTCCTGGCAGCGGTAC | TPSGATGSPGASPGTSS |
| | CGCATCTTCCTCTCCAGGTAGCTCTACTCCGTCTGGTGCA | TGSPGSTSSTAESPGPG |
| | ACTGGTTCCCCAGGTGCTTCTCCGGGTACCAGCTCTACCG | TSPSGESSTAPGTSTPES |
| | GTTCTCCAGGTTCCACCAGCTCTACTGCTGAATCTCCTGG | GSASP |
| | TCCAGGTACCTCTCCTAGCGGTGAATCTTCTACTGCTCCA | |
| | GGTACTTCTACTCCTGAAAGCGGCTCTGCTTCTCCA | |
| LCW462_r67 | GGTAGCCCGGCAGGCTCTCCGACCTCTACTGAGGAAGGT | GSPAGSPTSTEEGTSES |
| | ACTTCTGAAAGCGCAACCCCGGAGTCCGGCCCAGGTACC | ATPESGPGTSTEPSEGS |
| | TCTACCGAACCGTCTGAGGGCAGCGCACCAGGTACTTCT | APGTSESATPESGPGSE |
| | GAAAGCGCAACCCCTGAATCCGGTCCAGGTAGCGAACCG | PATSGSETPGTSTEPSEG |
| | GCTACTTCTGGCTCTGAGACTCCAGGTACTTCTACCGAAC | SAPGSPAGSPTSTEEGT |
| | CGTCCGAAGGTAGCGCACCAGGTAGCCCGGCTGGTTCTC | STEPSEGSAPGTSTEPSE |
| | CGACTTCCACCGAGGAAGGTACCTCTACTGAACCTTCTGA | GSAPGTSTEPSEGSAPG |
| | GGGTAGCGCTCCAGGTACCTCTACTGAACCTTCCGAAGG | TSTEPSEGSAPGTSTEPS |
| | CAGCGCTCCAGGTACTTCTACCGAACCGTCCGAGGGCAG | EGSAP |
| | CGCTCCAGGTACTTCTACTGAACCTTCTGAAGGCAGCGCT | |
| | CCAGGTACTTCTACTGAACCTTCCGAAGGTAGCGCACCA | |
| LCW462_r69 | GGTACTTCTCCGAGCGGTGAATCTTCTACCGCACCAGGTT | GTSPSGESSTAPGSTSST |
| | CTACTAGCTCTACCGCTGAATCTCCGGGCCCAGGTACTTC | AESPGPGTSPSGESSTAP |
| | TCCGAGCGGTGAATCTTCTACTGCTCCAGGTACCTCTGAA | GTSESATPESGPGTSTEP |
| | AGCGCTACTCCGGAGTCTGGCCCAGGTACCTCTACTGAAC | SEGSAPGTSTEPSEGSA |
| | CGTCTGAGGGTAGCGCTCCAGGTACTTCTACTGAACCGTC | PGSSPSASTGTGPGSSTP |
| | CGAAGGTAGCGCACCAGGTTCTAGCCCTTCTGCATCTACT | SGATGSPGASPGTSSTG |
| | GGTACTGGCCCAGGTAGCTCTACTCCTTCTGGTGCTACCG | SPGTSTPESGSASPGTSP |
| | GCTCTCCAGGTGCTTCTCCGGGTACTAGCTCTACCGGTTC | SGESSTAPGTSPSGESST |
| | TCCAGGTACTTCTACTCCGGAAAGCGGTTCCGCATCTCCA | AP |
| | GGTACTTCTCCTAGCGGTGAATCTTCTACTGCTCCAGGTA | |
| | CCTCTCCTAGCGGCGAATCTTCTACTGCTCCA | |
| LCW462_r70 | GGTACCTCTGAAAGCGCTACTCCGGAGTCTGGCCCAGGT | GTSESATPESGPGTSTEP |
| | ACCTCTACTGAACCGTCTGAGGGTAGCGCTCCAGGTACTT | SEGSAPGTSTEPSEGSA |
| | CTACTGAACCGTCCGAAGGTAGCGCACCAGGTAGCCCTG | PGSPAGSPTSTEEGSPA |
| | CTGGCTCTCCGACTTCTACTGAGGAAGGTAGCCCGGCTGG | GSPTSTEEGTSTEPSEGS |
| | TTCTCCGACTTCTACTGAGGAAGGTACTTCTACCGAACCT | APGSSPSASTGTGPGSS |
| | TCCGAAGGTAGCGCTCCAGGTTCTAGCCCTTCTGCTTCCA | TPSGATGSPGSSTPSGA |
| | CCGGTACTGGCCCAGGTAGCTCTACCCCTTCTGGTGCTAC | TGSPGSEPATSGSETPG |
| | CGGCTCCCCAGGTAGCTCTACTCCTTCTGGTGCAACTGGC | TSESATPESGPGSEPATS |
| | TCTCCAGGTAGCGAACCGGCAACTTCCGGCTCTGAAACC | GSETP |
| | CCAGGTACTTCTGAAAGCGCTACTCCTGAGTCTGGCCCAG | |
| | GTAGCGAACCTGCTACCTCTGGCTCTGAAACCCCA | |
| LCW462_T72 | GGTACTTCTACCGAACCGTCCGAAGGCAGCGCTCCAGGT | GTSTEPSEGSAPGTSTEP |
| | ACCTCTACTGAACCTTCCGAGGGCAGCGCTCCAGGTACCT | SEGSAPGTSTEPSEGSA |
| | CTACCGAACCTTCTGAAGGTAGCGCACCAGGTAGCTCTA | PGSSTPSGATGSPGASP |
| | CCCCGTCTGGTGCTACCGGTTCCCCAGGTGCTTCTCCTGG | GTSSTGSPGSSTPSGAT |
| | TACTAGCTCTACCGGTTCTCCAGGTAGCTCTACCCCGTCT | GSPGTSESATPESGPGS |
| | GGTGCTACTGGCTCTCCAGGTACTTCTGAAAGCGCAACCC | EPATSGSETPGTSTEPSE |
| | CTGAATCCGGTCCAGGTAGCGAACCGGCTACTTCTGGCTC | GSAPGSTSESPSGTAPG |
| | TGAGACTCCAGGTACTTCTACCGAACCGTCCGAAGGTAG | STSESPSGTAPGTSTPES |
| | CGCACCAGGTTCTACTAGCGAATCTCCTTCTGGCACTGCA | GSASP |
| | CCAGGTTCTACCAGCGAATCTCCGTCTGGCACTGCACCAG | |
| | GTACCTCTACCCCTGAAAGCGGTTCCGCTTCTCCA | |
| LCW462_T73 | GGTACCTCTACTCCTGAAAGCGGTTCTGCATCTCCAGGTT | GTSTPESGSASPGSTSST |
| | CCACTAGCTCTACCGCAGAATCTCCGGGCCCAGGTTCTAC | AESPGPGSTSSTAESPGP |
| | TAGCTCTACTGCTGAATCTCCTGGCCCAGGTTCTAGCCCT | GSSPSASTGTGPGSSTPS |
| | TCTGCATCTACTGGTACTGGCCCAGGTAGCTCTACTCCTT | GATGSPGASPGTSSTGS |
| | CTGGTGCTACCGGCTCTCCAGGTGCTTCTCCGGGTACTAG | PGSEPATSGSETPGTSES |
| | CTCTACCGGTTCTCCAGGTAGCGAACCGGCAACCTCCGGC | ATPESGPGSPAGSPTST |
| | TCTGAAACCCCAGGTACCTCTGAAAGCGCTACTCCTGAAT | EEGSTSESPSGTAPGSTS |
| | CCGGCCCAGGTAGCCCGGCAGGTTCTCCGACTTCCACTGA | ESPSGTAPGTSTPESGS |
| | GGAAGGTTCTACTAGCGAATCTCCTTCTGGCACTGCACCA | ASP |
| | GGTTCTACCAGCGAATCTCCGTCTGGCACTGCACCAGGTA | |
| | CCTCTACCCCTGAAAGCGGTTCCGCTTCTCCC | |
| LCW462_T78 | GGTAGCCCGGCTGGCTCTCCTACCTCTACTGAGGAAGGTA | GSPAGSPTSTEEGTSES |
| | CTTCTGAAAGCGCTACTCCTGAGTCTGGTCCAGGTACCTC | ATPESGPGTSTEPSEGS |
| | TACTGAACCGTCCGAAGGTAGCGCTCCAGGTTCTACCAG | APGSTSESPSGTAPGSTS |
| | CGAATCTCCTTCTGGCACCGCTCCAGGTTCTACTAGCGAA | ESPSGTAPGTSPSGESST |
| | TCCCCGTCTGGTACCGCACCAGGTACTTCTCCTAGCGGCG | APGTSTEPSEGSAPGSP |
| | AATCTTCTACCGCACCAGGTACCTCTACCGAACCTTCCGA | AGSPTSTEEGTSTEPSE |
| | AGGTAGCGCTCCAGGTAGCCCGGCAGGTTCTCCTACTTCC | GSAPGSEPATSGSETPG |
| | ACTGAGGAAGGTACTTCTACCGAACCTTCTGAGGGTAGC | TSESATPESGPGTSTEPS |
| | GCACCAGGTAGCGAACCTGCAACCTCTGGCTCTGAAACC | EGSAP |
| | CCAGGTACCTCTGAAAGCGCTACTCCTGAATCTGGCCCAG | |
| | GTACTTCTACTGAACCGTCCGAGGGCAGCGCACCA | |
| LCW462_T79 | GGTACCTCTACCGAACCTTCCGAAGGTAGCGCTCCAGGT | GTSTEPSEGSAPGSPAG |
| | AGCCCGGCAGGTTCTCCTACTTCCACTGAGGAAGGTACTT | SPTSTEEGTSTEPSEGSA |
| | CTACCGAACCTTCTGAGGGTAGCGCACCAGGTACCTCCCC | PGTSPSGESSTAPGTSPS |
| | TAGCGGCGAATCTTCTACTGCTCCAGGTACCTCTCCTAGC | GESSTAPGTSPSGESST |
| | GGCGAATCTTCTACCGCTCCAGGTACCTCCCCTAGCGGTG | APGSTSESPSGTAPGSTS |
| | AATCTTCTACCGCACCAGGTTCTACCAGCGAATCCCCTTC | ESPSGTAPGTSTPESGS |
| | TGGTACTGCTCCAGGTTCTACCAGCGAATCCCCTTCTGGC | ASPGSEPATSGSETPGT |
| | ACCGCACCAGGTACTTCTACCCCTGAAAGCGGCTCCGCTT | SESATPESGPGTSTEPSE |
| | CTCCAGGTAGCGAACCTGCAACCTCTGGCTCTGAAACCCC | GSAP |
| | AGGTACCTCTGAAAGCGCTACTCCTGAATCTGGCCCAGGT | |
| | ACTTCTACTGAACCGTCCGAGGGCAGCGCACCA | |
| LCW462_r87 | GGTAGCGAACCGGCAACCTCTGGCTCTGAAACCCCAGGT | GSEPATSGSETPGTSES |
| | ACCTCTGAAAGCGCTACTCCGGAATCTGGTCCAGGTACTT | ATPESGPGTSESATPES |
| | CTGAAAGCGCTACTCCGGAATCCGGTCCAGGTACTTCTCC | GPGTSPSGESSTAPGSTS |
| | GAGCGGTGAATCTTCTACCGCACCAGGTTCTACTAGCTCT | STAESPGPGTSPSGESST |
| | ACCGCTGAATCTCCGGGCCCAGGTACTTCTCCGAGCGGTG | APGSTSESPSGTAPGTSP |
| | AATCTTCTACTGCTCCAGGTTCTACTAGCGAATCCCCGTC | SGESSTAPGSTSSTAESP |
| | TGGTACTGCTCCAGGTACTTCCCCTAGCGGTGAATCTTCT | GPGSSTPSGATGSPGSS |
| | ACTGCTCCAGGTTCTACCAGCTCTACCGCAGAATCTCCGG | TPSGATGSPGSSTPSGA |
| | GTCCAGGTAGCTCTACTCCGTCTGGTGCAACCGGTTCCCC | NWLS |
| | AGGTAGCTCTACCCCTTCTGGTGCAACCGGCTCCCCAGGT | |
| | AGCTCTACCCCTTCTGGTGCAAACTGGCTCTCC | |
| LCW462_r88 | GGTAGCCCTGCTGGCTCTCCGACTTCTACTGAGGAAGGTA | GSPAGSPTSTEEGSPAG |
| | GCCCGGCTGGTTCTCCGACTTCTACTGAGGAAGGTACTTC | SPTSTEEGTSTEPSEGSA |
| | TACCGAACCTTCCGAAGGTAGCGCTCCAGGTACCTCTACT | PGTSTEPSEGSAPGTSTE |
| | GAACCTTCCGAAGGCAGCGCTCCAGGTACCTCTACCGAA | PSEGSAPGTSESATPES |
| | CCGTCCGAGGGCAGCGCACCAGGTACTTCTGAAAGCGCA | GPGASPGTSSTGSPGSS |
| | ACCCCTGAATCCGGTCCAGGTGCATCTCCTGGTACCAGCT | TPSGATGSPGASPGTSS |
| | CTACCGGTTCTCCAGGTAGCTCTACTCCTTCTGGTGCTAC | TGSPGSSTPSGATGSPG |
| | TGGCTCTCCAGGTGCTTCCCCGGGTACCAGCTCTACCGGT | TPGSGTASSSPGSSTPSG |
| | TCTCCAGGTAGCTCTACCCCGTCTGGTGCTACTGGTTCTC | ATGSP |
| | CAGGTACTCCGGGCAGCGGTACTGCTTCTTCCTCTCCAGG | |
| | TAGCTCTACCCCTTCTGGTGCTACTGGCTCTCCA | |
| LCW462_r89 | GGTAGCTCTACCCCGTCTGGTGCTACTGGTTCTCCAGGTA | GSSTPSGATGSPGTPGS |
| | CTCCGGGCAGCGGTACTGCTTCTTCCTCTCCAGGTAGCTC | GTASSSPGSSTPSGATG |
| | TACCCCTTCTGGTGCTACTGGCTCTCCAGGTAGCCCGGCT | SPGSPAGSPTSTEEGTSE |
| | GGCTCTCCTACCTCTACTGAGGAAGGTACTTCTGAAAGCG | SATPESGPGTSTEPSEGS |
| | CTACTCCTGAGTCTGGTCCAGGTACCTCTACTGAACCGTC | APGTSESATPESGPGSE |
| | CGAAGGTAGCGCTCCAGGTACCTCTGAAAGCGCAACTCC | PATSGSETPGTSESATPE |
| | TGAGTCTGGCCCAGGTAGCGAACCTGCTACCTCCGGCTCT | SGPGTSTEPSEGSAPGT |
| | GAGACTCCAGGTACCTCTGAAAGCGCAACCCCGGAATCT | SESATPESGPGTSESATP |
| | GGTCCAGGTACTTCTACTGAACCGTCTGAAGGTAGCGCA | ESGP |
| | CCAGGTACTTCTGAAAGCGCAACCCCGGAATCCGGCCCA | |
| | GGTACCTCTGAAAGCGCAACCCCGGAGTCCGGCCCA | |

### Example 7: Construction of XTEN_AM288

[0346] The entire library LCW0462 was dimerized as described in Example 6 resulting in a library of XTEN_AM288 clones designated LCW0463. 1512 isolates from library LCW0463 were screened using the protocol described in Example 6. 176 highly expressing clones were sequenced and 40 preferred XTEN_AM288 segments were chosen for the construction of multifunctional proteins that contain multiple XTEN segments with 288 amino acid residues.

### Example 8: Construction of XTEN_AM432

[0347] We generated a library of XTEN_AM432 segments by recombining segments from library LCW0462 of XTEN_AM144 segments and segments from library LCW0463 of XTEN_AM288 segments. This new library of XTEN_AM432 segment was designated LCW0464. Plasmid was isolated from cultures of E. coli harboring LCW0462 and LCW0463, respectively. 1512 isolates from library LCW0464 were screened using the protocol described in Example 6. 176 highly expressing clones were sequenced and 39 preferred XTEN_AM432 segment were chosen for the construction of longer XTENs and for the construction of multifunctional proteins that contain multiple XTEN segments with 432 amino acid residues.

[0348] In parallel we constructed library LMS0100 of XTEN_AM432 segments using preferred segments of XTEN_AM144 and XTEN_AM288. Screening of this library yielded 4 isolates that were selected for further construction

### Example 9: Construction of XTEN_AM875

[0349] The stuffer vector pCW0359 was digested with BsaI and KpnI to remove the stuffer segment and the resulting vector fragment was isolated by agarose gel purification.

[0350] We annealed the phosphorylated oligonucleotide BsaI-AscI-KpnIforP: AGGTGCAAGCGCAAGCGGCGCGCCAAGCACGGGAGGTTCGTCTTCACTCGAGGGTAC (SEQ ID NO: 673) and the non-phosphorylated oligonucleotide BsaI-AscI-KpnIrev: CCTCGAGTGAAGACGAACCTCCCGTGCTTGGCGCGCCGCTTGCGCTTGC (SEQ ID NO: 674) for introducing the sequencing island A (SI-A) which encodes amino acids GASASGAPSTG (SEQ ID NO: 675) and has the restriction enzyme AscI recognition nucleotide sequence GGCGCGCC inside. The annealed oligonucleotide pairs were ligated with BsaI and KpnI digested stuffer vector pCW0359 prepared above to yield pCW0466 containing SI-A. We then generated a library of XTEN_AM443 segments by recombining 43 preferred XTEN_AM432 segments from Example 8 and SI-A segments from pCW0466 at C-terminus using the same dimerization process described in Example 5. This new library of XTEN_AM443 segments was designated LCW0479.

[0351] We generated a library of XTEN_AM875 segments by recombining segments from library LCW0479 of XTEN_AM443 segments and 43 preferred XTEN_AM432 segments from Example 8 using the same dimerization process described in Example 5. This new library of XTEN_AM875 segment was designated LCW0481.

### Example 10: Construction of XTEN_AM1318

[0352] We annealed the phosphorylated oligonucleotide BsaI-FseI-KpnIforP: AGGTCCAGAACCAACGGGGCCGGCCCCAAGCGGAGGTTCGTCTTCACTCGAGGGTAC (SEQ ID NO: 676) and the non-phosphorylated oligonucleotide BsaI-FseI-KpnIrev:

(SEQ ID NO: 677)
CCTCGAGTGAAGACGAACCTCCGCTTGGGGCCGGCCCCGTTGGTTCTGG

[0353] for introducing the sequencing island B (SI-B) which encodes amino acids GPEPTGPAPSG (SEQ ID NO: 678) and has the restriction enzyme FseI recognition nucleotide sequence GGCCGGCC inside. The annealed oligonucleotide pairs were ligated with BsaI and KpnI digested stuffer vector pCW0359 as used in Example 9 to yield pCW0467 containing SI-B. We then generated a library of XTEN_AM443 segments by recombining 43 preferred XTEN_AM432 segments from Example 8 and SI-B segments from pCW0467 at C-terminus using the same dimerization process described in Example 5. This new library of XTEN_AM443 segments was designated LCW0480.

[0354] We generated a library of XTEN_AM1318 segments by recombining segments from library LCW0480 of XTEN_AM443 segments and segments from library LCW0481 of XTEN_AM875 segments using the same dimerization process as in Example 5. This new library of XTEN_AM1318 segment was designated LCW0487.

### Example 11: Construction of XTEN_AD864

[0355] Using the several consecutive rounds of dimerization, we assembled a collection of XTEN_AD864 sequences starting from segments of XTEN_AD36 listed in Example 1. These sequences were assembled as described in Example 5. Several isolates from XTEN_AD864 were evaluated and found to show good expression and excellent solubility under physiological conditions. One intermediate construct of XTEN_AD576 was sequenced. This clone was evaluated in a PK experiment in cynomolgus monkeys and a half-life of about 20 h was measured.

### Example 12: Construction of XTEN_AF864

[0356] Using the several consecutive rounds of dimerization, we assembled a collection of XTEN_AF864 sequences starting from segments of XTEN_AF36 listed in Example 3. These sequences were assembled as described in Example 5. Several isolates from XTEN_AF864 were evaluated and found to show good expression and excellent solubility under physiological conditions. One intermediate construct of XTEN_AF540 was sequenced. This clone was evaluated in a PK experiment in cynomolgus monkeys and a half-life of about 20 h was measured. A full length clone of XTEN_AF864 had excellent solubility and showed half-life exceeding 60 h in cynomolgus monkeys. A second set of XTEN_AF sequences was assembled including a sequencing island as described in Example 9.

### Example 13: Construction of XTEN_AG864

[0357] Using the several consecutive rounds of dimerization, we assembled a collection of XTEN_AG864 sequences starting from segments of XTEN_AG36 listed in Example 4. These sequences were assembled as described in Example 5. Several isolates from XTEN_AG864 were evaluated and found to show good expression and excellent solubility under physiological conditions. A full-length clone of XTEN_AG864 had excellent solubility and showed half-life exceeding 60 h in cynomolgus monkeys.

### Example 14: Methods of Producing and Evaluating GLP2-XTEN Containing GLP-2 and AE_XTEN

[0358] A general schema for producing and evaluating GLP2-XTEN compositions is presented in FIG. 6, and forms the basis for the general description of this Example. The GLP-2 peptides and sequence variants may be prepared recombinantly. Exemplary recombinant methods used to prepare GLP-2 peptides include the following, among others, as will be apparent to one skilled in the art. Typically, a GLP-2 peptide or sequence variant as defined and/or described herein is prepared by constructing the nucleic acid encoding the desired peptide, cloning the nucleic acid into an expression vector in frame with nucleic acid encoding one or more XTEN, transforming a host cell (e.g., bacteria such as Escherichia coli, yeast such as Saccharomyces cerevisiae, or mammalian cell such as Chinese hamster ovary cell or baby hamster kidney cell), and expressing the nucleic acid to produce the desired GLP2-XTEN. Methods for producing and expressing recombinant polypeptides in vitro and in prokaryotic and eukaryotic host cells are known to those of ordinary skill in the art. See, for example, U.S. Pat. No. 4,868,122, and Sambrook et al., Molecular Cloning—A Laboratory Manual (Third Edition), Cold Spring Harbor Laboratory Press (2001).

[0359] Using the disclosed methods and those known to one of ordinary skill in the art, together with guidance provided in the illustrative examples, a skilled artesian can create and evaluate GLP2-XTEN fusion proteins comprising XTENs, GLP-2 and variants of GLP-2 disclosed herein or otherwise known in the art. The Example is, therefore, to be construed as merely illustrative, and not limitative of the methods in any way whatsoever; numerous variations will be apparent to the ordinarily skilled artisan. In this Example, a GLP2-XTEN comprising a GLP-2 linked to an XTEN of the AE family of motifs is created.

[0360] The general scheme for producing polynucleotides encoding XTEN is presented in FIGS. 4 and 5. FIG. 5 is a schematic flowchart of representative steps in the assembly of a XTEN polynucleotide construct in one of the embodiments of the invention. Individual oligonucleotides 501 are annealed into sequence motifs 502 such as a 12 amino acid motif (“12-mer”), which is ligated to additional sequence motifs from a library that can multimerize to create a pool that encompasses the desired length of the XTEN 504, as well as ligated to a smaller concentration of an oligo containing BbsI, and KpnI restriction sites 503. The motif libraries can be limited to specific sequence XTEN families; e.g., AD, AE, AF, AG, AM, or AQ sequences of Table 3. As illustrated in FIG. 5, the XTEN length in this case is 864 amino acid residues, but shorter or longer lengths can be achieved by this process. For example, multimerization can be performed by ligation, overlap extension, PCR assembly or similar cloning techniques known in the art. The resulting pool of ligation products is gel-purified and the band with the desired length of XTEN is cut, resulting in an isolated XTEN gene with a stopper sequence 505. The XTEN gene can be cloned into a stuffer vector. In this case, the vector encodes an optional CBD sequence 506 and a GFP gene 508. Digestion is than performed with BbsI/HindIII to remove 507 and 508 and place the stop codon. The resulting product is then cloned into a BsaI/HindIII digested vector containing a gene encoding the GLP-2, resulting in the gene 500 encoding a GLP2-XTEN fusion protein. As would be apparent to one of ordinary skill in the art, the methods can be applied to create constructs in alternative configurations and with varying XTEN lengths.

[0361] DNA sequences encoding GLP-2 can be conveniently obtained by standard procedures known in the art from a cDNA library prepared from an appropriate cellular source, from a genomic library, or may be created synthetically (e.g., automated nucleic acid synthesis), particularly where sequence variants (e.g., GLP-2-2G) are to be incorporated, using DNA sequences obtained from publicly available databases, patents, or literature references. In the present example, the GLP-2-2G sequence is utilized. A gene or polynucleotide encoding the GLP-2 portion of the protein or its complement can be then be cloned into a construct, such as those described herein, which can be a plasmid or other vector under control of appropriate transcription and translation sequences for high level protein expression in a biological system. A second gene or polynucleotide coding for the XTEN portion or its complement can be genetically fused to the nucleotides encoding the terminus of the GLP-2 gene by cloning it into the construct adjacent and in frame with the gene coding for the GLP-2, through a ligation or multimerization step. In this manner, a chimeric DNA molecule coding for (or complementary to) the GLP2-XTEN fusion protein is generated within the construct. Optionally, a gene encoding for a second XTEN is inserted and ligated in-frame internally to the nucleotides encoding the GLP-2-encoding region. Optionally, this chimeric DNA molecule is transferred or cloned into another construct that is a more appropriate expression vector; e.g., a vector appropriate for a prokaryotic host cell such as E. coli, a eukaryotic host cell such as yeast, or a mammalian host cell such as CHO, BHK and the like. At this point, a host cell capable of expressing the chimeric DNA molecule is transformed with the chimeric DNA molecule. The vectors containing the DNA segments of interest can be transferred into an appropriate host cell by well-known methods, depending on the type of cellular host, as described supra.

[0362] Host cells containing the GLP2-XTEN expression vector are cultured in conventional nutrient media modified as appropriate for activating the promoter. The culture conditions, such as temperature, pH and the like, are those previously used with the host cell selected for expression, and will be apparent to the ordinarily skilled artisan. After expression of the fusion protein, culture broth is harvested and separated from the cell mass and the resulting crude extract retained for purification of the fusion protein.

[0363] Gene expression is measured in a sample directly, for example, by conventional Southern blotting, Northern blotting to quantitate the transcription of mRNA [Thomas, Proc. Natl. Acad. Sci. USA, 77:5201-5205 (1980)], dot blotting (DNA analysis), or in situ hybridization, using an appropriately labeled probe, based on the sequences provided herein. Alternatively, gene expression is measured by immunological of fluorescent methods, such as immunohistochemical staining of cells to quantitate directly the expression of gene product. Antibodies useful for immunohistochemical staining and/or assay of sample fluids may be either monoclonal or polyclonal, and may be prepared in any mammal Conveniently, the antibodies may be prepared against the GLP-2 sequence polypeptide using a synthetic peptide based on the sequences provided herein or against exogenous sequence fused to GLP-2 and encoding a specific antibody epitope. Examples of selectable markers are well known to one of skill in the art and include reporters such as enhanced green fluorescent protein (EGFP), beta-galactosidase (0-gal) or chloramphenicol acetyltransferase (CAT).

[0364] The GLP2-XTEN polypeptide product is purified via methods known in the art. Procedures such as gel filtration, affinity purification, salt fractionation, ion exchange chromatography, size exclusion chromatography, hydroxyapatite adsorption chromatography, hydrophobic interaction chromatography or gel electrophoresis are all techniques that may be used in the purification. Specific methods of purification are described in Robert K. Scopes, Protein Purification: Principles and Practice, Charles R. Castor, ed., Springer-Verlag 1994, and Sambrook, et al., supra. Multi-step purification separations are also described in Baron, et al., Crit. Rev. Biotechnol. 10:179-90 (1990) and Below, et al., J. Chromatogr. A. 679:67-83 (1994).

[0365] As illustrated in FIG. 6, the isolated GLP2-XTEN fusion proteins would then be characterized for their chemical and activity properties. Isolated fusion protein is characterized, e.g., for sequence, purity, apparent molecular weight, solubility and stability using standard methods known in the art. The fusion protein meeting expected standards would then be evaluated for activity, which can be measured in vitro or in vivo by measuring one of the GLP-2-associated parameters described herein, using one or more assays disclosed herein, or using the assays of the Examples or the assays of Table 32.

[0366] In addition, the GLP2-XTEN fusion protein is administered to one or more animal species to determine standard pharmacokinetic parameters and pharmacodynamic properties, as described in Examples 18-21.

[0367] By the iterative process of producing, expressing, and recovering GLP2-XTEN constructs, followed by their characterization using methods disclosed herein or others known in the art, the GLP2-XTEN compositions comprising GLP-2 and an XTEN can be produced and evaluated by one of ordinary skill in the art to confirm the expected properties such as enhanced solubility, enhanced stability, improved pharmacokinetics and reduced immunogenicity, leading to an overall enhanced therapeutic activity compared to the corresponding unfused GLP-2. For those fusion proteins not possessing the desired properties, a different sequence can be constructed, expressed, isolated and evaluated by these methods in order to obtain a composition with such properties.

### Example 15: Construction of GLP2-XTEN Genes and Vectors

[0368] Oligonucleotides were designed and constructed such that the entire GLP-2 gene could be assembled through the tiling together of these oligonucleotides via designed complementary over hang regions under conditions of a 48° C. annealing temperature. The complementary regions were held constant, but the other regions of the oligonucleotides were varied such that a codon library was created with ˜50% of the codons in the gene varied instead of the single native gene sequence. A PCR was performed to create a combined gene library which, as is typical, contained a variety of combinations of the oligonucleotides and presented as a smear on an agarose gel. A polishing PCR was performed to amplify those assemblies that had the correct termini using a set of amplification primers complimentary to the 5′ and 3′ ends of the gene. The product of this PCR was then gel purified, taking only bands at the ˜100 bp length of the expected GLP-2 final gene product. This gel-purified product was digested with BsaI and NdeI and ligated into a similarly digested construct containing DNA encoding a CBD leader sequence and the AE864 XTEN, to produce a GLP2-XTEN_AE864 gene, and transformed in BL21 gold competent cells. Colonies from this transformation were picked into 500 μl cultures of SB in 96 deep well plates and grown to saturation overnight. These cultures were stored at 4° C. after 20 μl of these cultures was used to inoculate 500 μl of auto-induction media and these cultures were grown at 26° C. for >24 hours. Following the growth the GFP fluorescence of 100 μl of these auto-induction media cultures was measured using a fluorescence plate reader. The GFP fluorescence is proportional to the number of molecules of GLP2-XTEN_AE464 made and is therefore a read-out of total expression. The highest expressing clones were identified, and a new 1 ml overnight was started in SB from the original saturated overnight culture of that clone. Mini-preps were performed with these new cultures and the derived plasmids were sequenced to determine the exact nucleotide composition. An E. coli isolate was designated strain AC453 and was identified as a strain that produced the desired GLP-2_2 G-XTEN_AE864 fusion protein. The DNA and amino acid sequences of the pre-cleavage expressed product (with a CBD leader and TEV cleavage sequence) and the amino acid sequence of the final product GLP-2-2G-XTEN_AE864 (after TEV cleavage) are provided in Table 13.

TABLE 13
GLP2-XTEN DNA and amino acid sequences (SEQ ID NOS 679-682, respectively,
in order of appearance)

| Clone | | |
|---|---|---|
| Name | DNA Sequence | Amino Acid Sequence |
| CBD-TEV- | ATGGCAAATACACCGGTATCAGGCAATTTGAAGGTTGAAT | MANTPVSGNLKVEF |
| GLP-2-2G- | TCTACAACAGCAATCCTTCAGATACTACTAACTCAATCAA | YNSNPSDTTNSINPQ |
| AE864 | TCCTCAGTTCAAGGTTACTAATACCGGAAGCAGTGCAATT | FKVTNTGSSAIDLSK |
| (pCW812/ | GATTTGTCCAAACTCACATTGAGATATTATTATACAGTAGA | LTLRYYYTVDGQKD |
| AC453) | CGGACAGAAAGATCAGACCTTCTGGGCTGACCATGCTGCA | QTFWADHAAIIGSN |
| | ATAATCGGCAGTAACGGCAGCTACAACGGAATTACTTCAA | GSYNGITSNVKGTF |
| | ATGTAAAAGGAACATTTGTAAAAATGAGTTCCTCAACAAA | VKMSSSTNNADTYL |
| | TAACGCAGACACCTACCTTGAAATCAGCTTTACAGGCGGA | EISFTGGTLEPGAHV |
| | ACTCTTGAACCGGGTGCACATGTTCAGATACAAGGTAGAT | QIQGRFAKNDWSNY |
| | TTGCAAAGAATGACTGGAGTAACTATACACAGTCAAATGA | TQSNDYSFKSASQF |
| | CTACTCATTCAAGTCTGCTTCACAGTTTGTTGAATGGGATC | VEWDQVTAYLNGV |
| | AGGTAACAGCATACTTGAACGGTGTTCTTGTATGGGGTAA | LVWGKEPGGSVVGS |
| | AGAACCCGGTGGCAGTGTAGTAGGTTCAGGTTCAGGATCC | GSGSENLYFQHGDG |
| | GAAAATCTGTATTTTCAACATGGTGACGGCTCTTTTAGCGA | SFSDEMNTILDNLA |
| | TGAAATGAATACTATACTGGACAACCTTGCGGCACGCGAC | ARDFINWLIQTKITD |
| | TTCATTAACTGGCTGATCCAGACAAAAATCACCGATGGAG | GGSPAGSPTSTEEGT |
| | GTAGCCCGGCTGGCTCTCCTACCTCTACTGAGGAAGGTAC | SESATPESGPGTSTE |
| | TTCTGAAAGCGCTACTCCTGAGTCTGGTCCAGGTACCTCTA | PSEGSAPGSPAGSPT |
| | CTGAACCGTCCGAAGGTAGCGCTCCAGGTAGCCCAGCAGG | STEEGTSTEPSEGSA |
| | CTCTCCGACTTCCACTGAGGAAGGTACTTCTACTGAACCTT | PGTSTEPSEGSAPGT |
| | CCGAAGGCAGCGCACCAGGTACCTCTACTGAACCTTCTGA | SESATPESGPGSEPA |
| | GGGCAGCGCTCCAGGTACTTCTGAAAGCGCTACCCCGGAA | TSGSETPGSEPATSG |
| | TCTGGCCCAGGTAGCGAACCGGCTACTTCTGGTTCTGAAA | SETPGSPAGSPTSTE |
| | CCCCAGGTAGCGAACCGGCTACCTCCGGTTCTGAAACTCC | EGTSESATPESGPGT |
| | AGGTAGCCCGGCAGGCTCTCCGACCTCTACTGAGGAAGGT | STEPSEGSAPGTSTE |
| | ACTTCTGAAAGCGCAACCCCGGAGTCCGGCCCAGGTACCT | PSEGSAPGSPAGSPT |
| | CTACCGAACCGTCTGAGGGCAGCGCACCAGGTACTTCTAC | STEEGTSTEPSEGSA |
| | CGAACCGTCCGAGGGTAGCGCACCAGGTAGCCCAGCAGG | PGTSTEPSEGSAPGT |
| | TTCTCCTACCTCCACCGAGGAAGGTACTTCTACCGAACCGT | SESATPESGPGTSTE |
| | CCGAGGGTAGCGCACCAGGTACCTCTACTGAACCTTCTGA | PSEGSAPGTSESATP |
| | GGGCAGCGCTCCAGGTACTTCTGAAAGCGCTACCCCGGAG | ESGPGSEPATSGSET |
| | TCCGGTCCAGGTACTTCTACTGAACCGTCCGAAGGTAGCG | PGTSTEPSEGSAPGT |
| | CACCAGGTACTTCTGAAAGCGCAACCCCTGAATCCGGTCC | STEPSEGSAPGTSES |
| | AGGTAGCGAACCGGCTACTTCTGGCTCTGAGACTCCAGGT | ATPESGPGTSESATP |
| | ACTTCTACCGAACCGTCCGAAGGTAGCGCACCAGGTACTT | ESGPGSPAGSPTSTE |
| | CTACTGAACCGTCTGAAGGTAGCGCACCAGGTACTTCTGA | EGTSESATPESGPGS |
| | AAGCGCAACCCCGGAATCCGGCCCAGGTACCTCTGAAAGC | EPATSGSETPGTSES |
| | GCAACCCCGGAGTCCGGCCCAGGTAGCCCTGCTGGCTCTC | ATPESGPGTSTEPSE |
| | CAACCTCCACCGAAGAAGGTACCTCTGAAAGCGCAACCCC | GSAPGTSTEPSEGSA |
| | TGAATCCGGCCCAGGTAGCGAACCGGCAACCTCCGGTTCT | PGTSTEPSEGSAPGT |
| | GAAACCCCAGGTACCTCTGAAAGCGCTACTCCGGAGTCTG | STEPSEGSAPGTSTE |
| | GCCCAGGTACCTCTACTGAACCGTCTGAGGGTAGCGCTCC | PSEGSAPGTSTEPSE |
| | AGGTACTTCTACTGAACCGTCCGAAGGTAGCGCACCAGGT | GSAPGSPAGSPTSTE |
| | ACTTCTACCGAACCGTCCGAAGGCAGCGCTCCAGGTACCT | EGTSTEPSEGSAPGT |
| | CTACTGAACCTTCCGAGGGCAGCGCTCCAGGTACCTCTAC | SESATPESGPGSEPA |
| | CGAACCTTCTGAAGGTAGCGCACCAGGTACTTCTACCGAA | TSGSETPGTSESATP |
| | CCGTCCGAGGGTAGCGCACCAGGTAGCCCAGCAGGTTCTC | ESGPGSEPATSGSET |
| | CTACCTCCACCGAGGAAGGTACTTCTACCGAACCGTCCGA | PGTSESATPESGPGT |
| | GGGTAGCGCACCAGGTACCTCTGAAAGCGCAACTCCTGAG | STEPSEGSAPGTSES |
| | TCTGGCCCAGGTAGCGAACCTGCTACCTCCGGCTCTGAGA | ATPESGPGSPAGSPT |
| | CTCCAGGTACCTCTGAAAGCGCAACCCCGGAATCTGGTCC | STEEGSPAGSPTSTE |
| | AGGTAGCGAACCTGCAACCTCTGGCTCTGAAACCCCAGGT | EGSPAGSPTSTEEGT |
| | ACCTCTGAAAGCGCTACTCCTGAATCTGGCCCAGGTACTT | SESATPESGPGTSTE |
| | CTACTGAACCGTCCGAGGGCAGCGCACCAGGTACTTCTGA | PSEGSAPGTSESATP |
| | AAGCGCTACTCCTGAGTCCGGCCCAGGTAGCCCGGCTGGC | ESGPGSEPATSGSET |
| | TCTCCGACTTCCACCGAGGAAGGTAGCCCGGCTGGCTCTC | PGTSESATPESGPGS |
| | CAACTTCTACTGAAGAAGGTAGCCCGGCAGGCTCTCCGAC | EPATSGSETPGTSES |
| | CTCTACTGAGGAAGGTACTTCTGAAAGCGCAACCCCGGAG | ATPESGPGTSTEPSE |
| | TCCGGCCCAGGTACCTCTACCGAACCGTCTGAGGGCAGCG | GSAPGSPAGSPTSTE |
| | CACCAGGTACCTCTGAAAGCGCAACTCCTGAGTCTGGCCC | EGTSESATPESGPGS |
| | AGGTAGCGAACCTGCTACCTCCGGCTCTGAGACTCCAGGT | EPATSGSETPGTSES |
| | ACCTCTGAAAGCGCAACCCCGGAATCTGGTCCAGGTAGCG | ATPESGPGSPAGSPT |
| | AACCTGCAACCTCTGGCTCTGAAACCCCAGGTACCTCTGA | STEEGSPAGSPTSTE |
| | AAGCGCTACTCCTGAATCTGGCCCAGGTACTTCTACTGAA | EGTSTEPSEGSAPGT |
| | CCGTCCGAGGGCAGCGCACCAGGTAGCCCTGCTGGCTCTC | SESATPESGPGTSES |
| | CAACCTCCACCGAAGAAGGTACCTCTGAAAGCGCAACCCC | ATPESGPGTSESATP |
| | TGAATCCGGCCCAGGTAGCGAACCGGCAACCTCCGGTTCT | ESGPGSEPATSGSET |
| | GAAACCCCAGGTACTTCTGAAAGCGCTACTCCTGAGTCCG | PGSEPATSGSETPGS |
| | GCCCAGGTAGCCCGGCTGGCTCTCCGACTTCCACCGAGGA | PAGSPTSTEEGTSTE |
| | AGGTAGCCCGGCTGGCTCTCCAACTTCTACTGAAGAAGGT | PSEGSAPGTSTEPSE |
| | ACTTCTACCGAACCTTCCGAGGGCAGCGCACCAGGTACTT | GSAPGSEPATSGSET |
| | CTGAAAGCGCTACCCCTGAGTCCGGCCCAGGTACTTCTGA | PGTSESATPESGPGT |
| | AAGCGCTACTCCTGAATCCGGTCCAGGTACTTCTGAAAGC | STEPSEGSAPG |
| | GCTACCCCGGAATCTGGCCCAGGTAGCGAACCGGCTACTT | |
| | CTGGTTCTGAAACCCCAGGTAGCGAACCGGCTACCTCCGG | |
| | TTCTGAAACTCCAGGTAGCCCAGCAGGCTCTCCGACTTCC | |
| | ACTGAGGAAGGTACTTCTACTGAACCTTCCGAAGGCAGCG | |
| | CACCAGGTACCTCTACTGAACCTTCTGAGGGCAGCGCTCC | |
| | AGGTAGCGAACCTGCAACCTCTGGCTCTGAAACCCCAGGT | |
| | ACCTCTGAAAGCGCTACTCCTGAATCTGGCCCAGGTACTT | |
| | CTACTGAACCGTCCGAGGGCAGCGCACCAGGT | |
| GLP-2-2G- | CATGGTGACGGCTCTTTTAGCGATGAAATGAATACTATAC | HGDGSFSDEMNTIL |
| AE864 | TGGACAACCTTGCGGCACGCGACTTCATTAACTGGCTGAT | DNLAARDFINWLIQ |
| | CCAGACAAAAATCACCGATGGAGGTAGCCCGGCTGGCTCT | TKITDGGSPAGSPTS |
| | CCTACCTCTACTGAGGAAGGTACTTCTGAAAGCGCTACTC | TEEGTSESATPESGP |
| | CTGAGTCTGGTCCAGGTACCTCTACTGAACCGTCCGAAGG | GTSTEPSEGSAPGSP |
| | TAGCGCTCCAGGTAGCCCAGCAGGCTCTCCGACTTCCACT | AGSPTSTEEGTSTEP |
| | GAGGAAGGTACTTCTACTGAACCTTCCGAAGGCAGCGCAC | SEGSAPGTSTEPSEG |
| | CAGGTACCTCTACTGAACCTTCTGAGGGCAGCGCTCCAGG | SAPGTSESATPESGP |
| | TACTTCTGAAAGCGCTACCCCGGAATCTGGCCCAGGTAGC | GSEPATSGSETPGSE |
| | GAACCGGCTACTTCTGGTTCTGAAACCCCAGGTAGCGAAC | PATSGSETPGSPAGS |
| | CGGCTACCTCCGGTTCTGAAACTCCAGGTAGCCCGGCAGG | PTSTEEGTSESATPE |
| | CTCTCCGACCTCTACTGAGGAAGGTACTTCTGAAAGCGCA | SGPGTSTEPSEGSAP |
| | ACCCCGGAGTCCGGCCCAGGTACCTCTACCGAACCGTCTG | GTSTEPSEGSAPGSP |
| | AGGGCAGCGCACCAGGTACTTCTACCGAACCGTCCGAGGG | AGSPTSTEEGTSTEP |
| | TAGCGCACCAGGTAGCCCAGCAGGTTCTCCTACCTCCACC | SEGSAPGTSTEPSEG |
| | GAGGAAGGTACTTCTACCGAACCGTCCGAGGGTAGCGCAC | SAPGTSESATPESGP |
| | CAGGTACCTCTACTGAACCTTCTGAGGGCAGCGCTCCAGG | GTSTEPSEGSAPGTS |
| | TACTTCTGAAAGCGCTACCCCGGAGTCCGGTCCAGGTACT | ESATPESGPGSEPAT |
| | TCTACTGAACCGTCCGAAGGTAGCGCACCAGGTACTTCTG | SGSETPGTSTEPSEG |
| | AAAGCGCAACCCCTGAATCCGGTCCAGGTAGCGAACCGGC | SAPGTSTEPSEGSAP |
| | TACTTCTGGCTCTGAGACTCCAGGTACTTCTACCGAACCGT | GTSESATPESGPGTS |
| | CCGAAGGTAGCGCACCAGGTACTTCTACTGAACCGTCTGA | ESATPESGPGSPAGS |
| | AGGTAGCGCACCAGGTACTTCTGAAAGCGCAACCCCGGAA | PTSTEEGTSESATPE |
| | TCCGGCCCAGGTACCTCTGAAAGCGCAACCCCGGAGTCCG | SGPGSEPATSGSETP |
| | GCCCAGGTAGCCCTGCTGGCTCTCCAACCTCCACCGAAGA | GTSESATPESGPGTS |
| | AGGTACCTCTGAAAGCGCAACCCCTGAATCCGGCCCAGGT | TEPSEGSAPGTSTEP |
| | AGCGAACCGGCAACCTCCGGTTCTGAAACCCCAGGTACCT | SEGSAPGTSTEPSEG |
| | CTGAAAGCGCTACTCCGGAGTCTGGCCCAGGTACCTCTAC | SAPGTSTEPSEGSAP |
| | TGAACCGTCTGAGGGTAGCGCTCCAGGTACTTCTACTGAA | GTSTEPSEGSAPGTS |
| | CCGTCCGAAGGTAGCGCACCAGGTACTTCTACCGAACCGT | TEPSEGSAPGSPAGS |
| | CCGAAGGCAGCGCTCCAGGTACCTCTACTGAACCTTCCGA | PTSTEEGTSTEPSEG |
| | GGGCAGCGCTCCAGGTACCTCTACCGAACCTTCTGAAGGT | SAPGTSESATPESGP |
| | AGCGCACCAGGTACTTCTACCGAACCGTCCGAGGGTAGCG | GSEPATSGSETPGTS |
| | CACCAGGTAGCCCAGCAGGTTCTCCTACCTCCACCGAGGA | ESATPESGPGSEPAT |
| | AGGTACTTCTACCGAACCGTCCGAGGGTAGCGCACCAGGT | SGSETPGTSESATPE |
| | ACCTCTGAAAGCGCAACTCCTGAGTCTGGCCCAGGTAGCG | SGPGTSTEPSEGSAP |
| | AACCTGCTACCTCCGGCTCTGAGACTCCAGGTACCTCTGA | GTSESATPESGPGSP |
| | AAGCGCAACCCCGGAATCTGGTCCAGGTAGCGAACCTGCA | AGSPTSTEEGSPAGS |
| | ACCTCTGGCTCTGAAACCCCAGGTACCTCTGAAAGCGCTA | PTSTEEGSPAGSPTS |
| | CTCCTGAATCTGGCCCAGGTACTTCTACTGAACCGTCCGA | TEEGTSESATPESGP |
| | GGGCAGCGCACCAGGTACTTCTGAAAGCGCTACTCCTGAG | GTSTEPSEGSAPGTS |
| | TCCGGCCCAGGTAGCCCGGCTGGCTCTCCGACTTCCACCG | ESATPESGPGSEPAT |
| | AGGAAGGTAGCCCGGCTGGCTCTCCAACTTCTACTGAAGA | SGSETPGTSESATPE |
| | AGGTAGCCCGGCAGGCTCTCCGACCTCTACTGAGGAAGGT | SGPGSEPATSGSETP |
| | ACTTCTGAAAGCGCAACCCCGGAGTCCGGCCCAGGTACCT | GTSESATPESGPGTS |
| | CTACCGAACCGTCTGAGGGCAGCGCACCAGGTACCTCTGA | TEPSEGSAPGSPAGS |
| | AAGCGCAACTCCTGAGTCTGGCCCAGGTAGCGAACCTGCT | PTSTEEGTSESATPE |
| | ACCTCCGGCTCTGAGACTCCAGGTACCTCTGAAAGCGCAA | SGPGSEPATSGSETP |
| | CCCCGGAATCTGGTCCAGGTAGCGAACCTGCAACCTCTGG | GTSESATPESGPGSP |
| | CTCTGAAACCCCAGGTACCTCTGAAAGCGCTACTCCTGAA | AGSPTSTEEGSPAGS |
| | TCTGGCCCAGGTACTTCTACTGAACCGTCCGAGGGCAGCG | PTSTEEGTSTEPSEG |
| | CACCAGGTAGCCCTGCTGGCTCTCCAACCTCCACCGAAGA | SAPGTSESATPESGP |
| | AGGTACCTCTGAAAGCGCAACCCCTGAATCCGGCCCAGGT | GTSESATPESGPGTS |
| | AGCGAACCGGCAACCTCCGGTTCTGAAACCCCAGGTACTT | ESATPESGPGSEPAT |
| | CTGAAAGCGCTACTCCTGAGTCCGGCCCAGGTAGCCCGGC | SGSETPGSEPATSGS |
| | TGGCTCTCCGACTTCCACCGAGGAAGGTAGCCCGGCTGGC | ETPGSPAGSPTSTEE |
| | TCTCCAACTTCTACTGAAGAAGGTACTTCTACCGAACCTTC | GTSTEPSEGSAPGTS |
| | CGAGGGCAGCGCACCAGGTACTTCTGAAAGCGCTACCCCT | TEPSEGSAPGSEPAT |
| | GAGTCCGGCCCAGGTACTTCTGAAAGCGCTACTCCTGAAT | SGSETPGTSESATPE |
| | CCGGTCCAGGTACTTCTGAAAGCGCTACCCCGGAATCTGG | SGPGTSTEPSEGSAP |
| | CCCAGGTAGCGAACCGGCTACTTCTGGTTCTGAAACCCCA | G |
| | GGTAGCGAACCGGCTACCTCCGGTTCTGAAACTCCAGGTA | |
| | GCCCAGCAGGCTCTCCGACTTCCACTGAGGAAGGTACTTC | |
| | TACTGAACCTTCCGAAGGCAGCGCACCAGGTACCTCTACT | |
| | GAACCTTCTGAGGGCAGCGCTCCAGGTAGCGAACCTGCAA | |
| | CCTCTGGCTCTGAAACCCCAGGTACCTCTGAAAGCGCTAC | |
| | TCCTGAATCTGGCCCAGGTACTTCTACTGAACCGTCCGAG | |
| | GGCAGCGCACCAGGT | |

### Example 16: Expression and Purification of Fusion Proteins Comprising GLP-2-2G Fused to XTEN_AE864

[0369] The host strain for expression, AmE025, was derived from E. coli W3110, a strain with a K-12 background, having a deletion of the fhuA gene and with the lambda DE3 prophage integrated onto the chromosome. The host cell contained the plasmid pCW1010 (AC616), encoding an amino acid sequence that is identical to that encoded by pCW812 (AC453). The final construct comprised the gene encoding the cellulosome anchoring protein cohesion region cellulose binding domain (CBD) from Clostridium thermocellum (accession #ABN54273), a tobacco etch virus (TEV) protease recognition site (ENLYFQ (SEQ ID NO: 683)), the GLP2-2G sequence, and an AE864 amino acid XTEN sequence under control of a T7 promoter. The protein was expressed in a 5 L glass jacketed fermentation vessel with a B. Braun Biostat B controller. Briefly, a starter culture of host strain AmE025 was used to inoculate 2 L of fermentation batch media. After 6 hours of culture at 37° C., a 50% glucose feed was initiated. After 20 hours of culture, the temperature was reduced to 26° C. and 1M IPTG was added to induce expression. After a total fermentation run time of 45 hours, the culture was harvested by centrifugation yielding cell pellets ˜1 kg in wet weight. The pellets were stored frozen at −80° C. until purification was initiated.

[0370] Lysis, Heat Flocculation and Clarification

[0371] The resulting cell paste was resuspended at ambient temperature in 20 mM Tris-HCl pH 7.5, 50 mM NaCl, at a ratio of ˜4 ml per 1 g of cell paste. The cells were lysed by 2 passes through an APV 2000 homogenizer at an operating pressure of 800-900 bar. After lysis, the homogenate was heated to ˜85° C. in a heat exchanger and held for 20 minutes to coagulate host cell protein, then rapidly cooled to ˜10° C. The cooled homogenate was clarified by centrifugation at 4,000 rpm for 60 min using a Sorvall H6000A rotor in a Sorvall RC-3C centrifuge. The supernatant was decanted, passed through a 60SP03A Zeta Plus EXT depth filter (3M), followed by passage through a 0.2 μm LifeASSURE PDA sterile capsule and stored at 4° C. overnight.

[0372] Initial Anion Exchange Capture with Toyopearl SuperQ-650M Resin

[0373] GLP2-2G-XTEN was isolated out of the clarified lysate using 3 columns steps at ambient temperature. GLP2-2G-XTEN was captured using Toyopearl SuperQ-650M (Tosoh) anion exchange resin, which selects for the negatively charged XTEN polypeptide tail and removes the bulk of host cell protein. An appropriately scaled SuperQ-650M column was equilibrated with 5 column volumes of 20 mM Tris-HCl pH 7.5, 50 mM NaCl and the lysate was loaded onto the column at a linear flow rate of 120 cm/hr. The column was then washed with 3 column volumes of 20 mM Tris-HCl pH 7.5, 50 mM NaCl and 3 column volumes of 20 mM Tris-HCl pH 7.5, 150 mM NaCl, until the UV absorbance returned to baseline. GLP2-2G-XTEN protein was eluted with a 7 column volume linear gradient from 150 mM NaCl to 300 mM NaCl in 20 mM NaCl Tris-HCl, pH 7.5. Fractions were collected throughout and analyzed by SDS-PAGE for pooling and storage at 2-8° C. Product purity was determined to be ˜80% after the Super Q capture step.

[0374] Intermediate Anion Exchange Capture with GE MacroCap Q Resin

[0375] The resulting SuperQ pool was diluted ˜4-fold with 20 mM Tris-HCl pH 7.5 to reduce the conductivity to <10 mS/cm. An appropriately scaled MacroCap Q anion exchange column (GE Life Sciences) selects for the full-length intact XTEN polypeptide tail and removes the bulk of endotoxin and any residual host cell protein and DNA. The column was equilibrated with 5 column volumes of 20 mM Tris-HCl pH 7.5, 50 mM NaCl. The diluted SuperQ pool was loaded at a linear flow rate of 120 cm/hr. The column was then washed with 3 column volumes of 20 mM Tris-HCl pH 7.5, 50 mM NaCl, and then 3 column volumes of 20 mM Tris-HCl pH 7.5, 150 mM NaCl, until the UV absorbance returned to baseline. GLP2-2G-XTEN protein was eluted with a 12 column volume linear gradient from 150 mM NaCl to 300 mM NaCl in 20 mM Tris-HCl pH 7.5. Fractions were collected throughout and analyzed by SDS-PAGE for pooling and storage at 2-8° C. Product purity was determined to be >95% after the MacroCap Q intermediate step.

[0376] Hydrophobic Interaction Chromatography (HIC) Using Toyopearl Phenyl-650M Resin

[0377] An appropriate amount of solid NaCl salt was dissolved in the MacroCap Q pool to adjust load to 4 M NaCl, and then was sterile filtered through a 0.2 μm filter. An appropriately scaled Toyopearl Phenyl-650M (Tosoh) column selects for the hydrophobic residues of the GLP2 payload and removes residual XTEN fragments and endotoxin. The column was equilibrated with 5 column volumes of 20 mM Tris-HCl pH 7.5, 4 M NaCl. The MacroCap Q pool was loaded at a linear flow rate of 60 cm/hr. The column was then washed with 3 column volumes of 20 mM Tris-HCl pH 7.5, 4 M NaCl. GLP2-2G-XTEN protein was eluted with a step-down gradient to 1.2 M NaCl in 20 mM Tris-HCl pH 7.5. The elution peak was fractionated and analyzed by SDS-PAGE to confirm successful capture and elution of GLP2-2G-XTEN. Product purity was determined to be >95% after the final polishing step. The resulting pool was concentrated to ˜11 mg/ml and buffer exchanged into 20 mM Tris-HCl pH 7.5, 135 mM NaCl formulation buffer using a 30 KDa MWCO Pellicon XL 50 Ultrafiltration Cassette (Millipore). The purified lot of GLP2-2G-XTEN was designated AP690 and stored at −80° C. until further use.

[0378] SDS-PAGE Analysis

[0379] SDS-PAGE analysis was conducted with 2 μg, 5 μg and 10 μg of AP690 loaded onto a NuPAGE 4-12% Bis Tris Gel (Invitrogen) and then run for 35 minutes at a constant 200V. The results (FIG. 11A) showed that the AP690 protein was free from host cell impurities and that it migrated near the 160 kDa marker, the expected result for a payload-XTEN fusion protein of this molecular weight and composition.

[0380] Endotoxin Content

[0381] Endotoxin levels of lot AP690 was assessed using an EndoSafe PTS test cartridge (Carles River) and determined to be 3.5 EU/mg of protein, making the AP690 lot appropriate for injection into test animals for pharmacokinetic or pharmacodynamic studies.

[0382] Analytical Size Exclusion HPLC

[0383] Gel filtration analysis was performed using a Phenomenex BioSep-SEC-s4000 (7.8 mm×600 mm) column. 20 μg or AP690 GLP2-2G-XTEN fusion protein were analyzed at a flowrate of 0.5 ml/min with 50 mM Phosphate pH 6.5, 300 mM NaCl mobile phase. Elution was monitored using OD215 nm. Column calibration was performed using a size exclusion check standard from Phenomenex, with the following markers: thyroglobulin (670 kDa), IgG (156 kDa), BSA (66 kDa) and ovalbumin (17 kDa). The result (FIG. 11B) indicated an apparent molecular weight of 1002 kDa for the fusion protein of 83.1 kDa actual weight, for an apparent molecular weight factor of 12.5.

[0384] Intact Mass Determination by ESI-MS

[0385] 200 μg of AP690 GLP2-2G-XTEN protein was desalted by solid phase extraction using an Extract-Clean C18 column (Discovery Sciences). The desalted protein solution in 0.1% formic acid, 50% acetonitrile was infused at 4 μI/min into a QSTAR XL mass spectrometer (AB Sciex). Multicharge TOF spectrum was acquired in 800-1400 amu range. A zero-charge spectrum was obtained by Bayesian reconstruction in 10-100 kDa range (FIG. 12). The experimental mass of the full length intact GLP2-2G-XTEN was determined to be 83,142 Da, with an additional minor peak of 83,003 Da detected, representing the des-His GLP2-2G-XTEN at <5% of total protein.

### Example 17: Characterization of GLP2-XTEN In Vitro Receptor Binding by Calcium Flux Potency Assay

[0386] A receptor binding assay was performed using a GPCRProfiler assay (Millipore) to assess GLP2-2G-XTEN preparations (including AP690). The assay employed a transfected GLP2R cell line (Millipore, Cat #HTS164C) consisting of a Chem-11 human cell stably transfected with the GLP2 G-protein coupled receptor and a G alpha protein that stimulates calcium flux upon agonism of the GLP2 receptor. Assays were performed by addition of serial dilutions of GLP2-2G-XTEN, synthetic GLP2-2G peptide (without XTEN) and synthetic native GLP2 peptide, and the calcium flux was monitored in real-time by a FLIPR TETRA instrument (Molecular Devices) using the no wash calcium assay kit (Molecular devices). The results, presented in FIG. 13, were used to derive EC50 values of 370 nM for GLP2-2G-XTEN and 7 nM for GLP2-2G peptide. The results indicate that the GLP2-2G-XTEN was able to bind and activate the GLP-2 receptor, with about 2% of the potency compared to GLP2-2G.

### Example 18: Pharmacokinetic Evaluation of GLP2-XTEN in Mice

[0387] The fusion protein GLP2-2G-XTEN_AE864 was evaluated for its pharmacokinetic properties in C57Bl/6 mice following subcutaneous (SC) administration. Female C57Bl/6 mice were injected SC with 2 mg/kg (25 nmol/kg) of the GLP2-2G-XTEN (lot AP498A) at 0.25 mg/mL (8 mL/kg). Three mice were sacrificed at each of the following time points: Predose, 0.08, 4, 8, 24, 48, 72, 96 and 120 hours post-dose. Blood samples were collected from the mice and placed into prechilled heparinized tubes at each interval and were separated by centrifugation to recover the plasma. The samples were analyzed for fusion protein concentration, performed by both anti-XTEN/anti-XTEN sandwich ELISA (AS1405) and anti-GLP2/anti-XTEN sandwich ELISA (AS1717), and the results were analyzed using WinNonLin to obtain the PK parameters. Terminal half-life was fit from 24 to 120 hours. The results are presented in Table 14 and FIG. 14, with both assays showing essentially equivalent results, with a terminal half-life of 31.6-33.9 h determined.

TABLE 14
GLP2-2G-XTEN-864 Pharmacokinetics

| | Cₘₐₓ | AUClast | T ½ | Vd |
|---|---|---|---|---|
| Group | (ng/ml) | (hr * ng/ml) | (hr) | (ml) |
| XTEN-XTEN | 13,600 | 773,000 | 31.6 | 2.7 |
| ELISA | | | | |
| GLP2-XTEN | 11,200 | 720,000 | 33.9 | 3.4 |
| ELISA | | | | |

### Example 19: Pharmacokinetic Evaluation of GLP2-XTEN in Rats

[0388] The fusion protein GLP2-2G-XTEN_AE864 was evaluated for its pharmacokinetic properties in Wistar rats following SC administration of two different dosage levels. Prior to the experiment, catheters were surgically implanted into the jugular vein of female Wistar rats. The catheterized animals were randomized into two groups containing three rats each. The fusion protein GLP2-2G-XTEN (lot AP510) was administered to each rat via SC injection as follows: 1) Low Dose 2 mg/kg (25 nmol/kg); or 2) High Dose 16 mg/kg (200 nmol/kg). Blood samples (˜0.2 mL) were collected through the jugular vein catheter from each rat into prechilled heparinized tubes at pre-dose, 0.08, 4, 8, 24, 48, 72, 96, 120 and 168 hours after test compound administration (10 time points). Blood was processed into plasma by centrifugation, split into two aliquots for analysis by ELISA. The samples were analyzed for fusion protein concentration, performed by both anti-XTEN/anti-XTEN sandwich ELISA (AS1602) and anti-GLP2/anti-XTEN sandwich ELISA (AS1705) and the results were analyzed using WinNonLin to obtain the PK parameters. Terminal half life was fit from 48 to 168 hours. The results are presented in Table 15 and FIG. 15, with both assays showing essentially equivalent results and with a terminal half-life of 37.5-49.7 h determined, greatly exceeding the reported terminal half-life for GLP-2 and for GLP2-2G. In addition, the pharmacokinetic profile of GLP2-2G-XTEN after single subcutaneous administration to rats at 25 nmol/kg and 200 nmol/kg was dose proportional with the C. and AUC increasing in an approximately linear manner

TABLE 15
GLP2-2G-XTEN-864 Pharmacokinetics

| | T ½ | Cₘₐₓ | AUCInf | Vz | Cl |
|---|---|---|---|---|---|
| | (hr) | (ng/ml) | (hr * ng/mL) | (mL) | (mL/hr) |
| ANTI-XTEN ELISA | | | | | |
| High Dose | 42.0 | 37900 | 3000000 | 65.0 | 1.07 |
| (16 mg/kg) | | | | | |
| Low Dose | 42.6 | 6270 | 530000 | 43.4 | 0.71 |
| (2 mg/kg) | | | | | |
| ANTI-GLP2-XTEN | | | | | |
| ELISA | | | | | |
| High Dose | 49.7 | 40300 | 3660000 | 70.2 | 0.972 |
| (16 mg/kg) | | | | | |
| Low Dose | 37.5 | 6900 | 530000 | 43.4 | 0.797 |
| (2 mg/kg) | | | | | |

### Example 20: Pharmacokinetic Evaluation of GLP2-XTEN in Cynomolgus Monkeys

[0389] The fusion protein GLP2-2G-XTEN_AE864 was evaluated for its pharmacokinetic properties in male cynomolgus monkeys following either subcutaneous or intravenous administration of the fusion protein at a single dosage level. Three male cynomolgus monkeys were injected IV and 3 male cynomolgus monkeys were injected SC with 2 mg/kg (25 nmol/kg) GLP2-2G-XTEN at time 0. Blood samples were collected from each monkey into prechilled heparinized tubes at pre-dose and at approximately 0.083 h (5 min), 1, 2, 4, 8, 24, 48, 72, 96, 120, 168, 216, 264, and 336 hours after administration of the fusion protein for the first phase of the study. Animals were allowed to “wash-out” for a 6 week period (4 weeks post-last collection time point of Phase 1), the groups were crossed over (SC to IV and IV to SC), and dosed again with the same dose of GLP2-2G-XTEN fusion protein. Blood samples were collected at pre-dose and at approximately 0.083 h (5 min), 1, 2, 4, 8, 24, 48, 72, 96, 120, 168, 216, 264, 336, 384, 432, and 504 hours post-dose in the second phase of the study. All blood samples were processed into plasma by centrifugation and split into two aliquots for analysis by ELISA. The samples were analyzed for fusion protein concentration, performed by anti-GLP2/anti-XTEN ELISA (AS1705) and the results were analyzed using WinNonLin to obtain the PK parameters. The results are presented in Table 16 and FIG. 16, with a terminal half-life for the GLP2-2G-XTEN_AE864 fusion protein of 110 h for IV and 120 h for SC administration determined. The bioavailability was 96% demonstrating that GLP2-2G-XTEN is rapidly and near completely absorbed after subcutaneous administratio

TABLE 16
GLP2-2G-XTEN-864 Pharmacokinetics

| | T½ | Cₘₐₓ | AUCInf | Vd | Cl |
|---|---|---|---|---|---|
| GROUP | (hr) | (ng/ml) | (hr * ng/mL) | (mL/kg) | (mL/hr) |
| IV | 110.0 | 62000 | 3,700,000 | 90 | 1.9 |
| SC | 120.0 | 20000 | 3,400,000 | 110 | 2.0 |

[0390] The cumulative results of the PK analyses were used to perform allometric scaling of GLP2-2G_AE864 terminal half-life, clearance and volume of distribution using data from three species (mouse, rat and monkey). Pharmacokinetic values for a 70 kg human were predicted by extrapolating the log linear relationship between body weight and each pharmacokinetic parameter, as shown in FIG. 17. The data for terminal half life, volume of distribution and clearance are presented in Table 17. The predicted terminal half-life in humans of 240 h, greatly exceeds the reported 3.2 h terminal half-life of teduglutide in humans (Marier, J-F, et al. Pharmacokinetics, Safety, and Tolerability of Teduglutide, a Glucagon-Like Peptide-2 (GLP-2) Analog, Following Multiple Ascending Subcutaneous Administrations in Healthy Subjects. J Clin Pharmacol (2008) 48:1289-1299). The terminal half-life in humans can also be estimated using the predicted values for clearance (Cl) and volume of distribution (Vd) as 0.693×Vd/Cl. Applying this formula yields a predicted terminal half-life of 230 h in humans, which agrees well with the extrapolation from the animal T½ data, and which greatly exceeds the reported terminal half-life for native GLP-2 and for GLP2-2G.

TABLE 17
Allometric scaling of GLP2-2G-XTEN-864 pharmacokinetics

| | | | | Cl |
|---|---|---|---|---|
| Species | Mass (kg) | T 1/2 (hr) | Vd (mL/kg) | (ml/hr) |
| Mouse | 0.025 | 33.9 | 140 | 0.07 |
| Rat | 0.206 | 43.6 | 210 | 0.80 |
| Cyno | 2.9 | 125 | 98 | 1.6 |
| Human | 70 | 240* | 91* | 17* |

*predicted value

### Example 21: Pharmacodynamic Evaluation of GLP2-XTEN in Animal Models

[0391] The in vivo pharmacologic activity of the GLP2-2G-XTEN_AE864 fusion protein was assessed using preclinical models of intestinotrophic growth in normal rats and efficacy in mouse DSS-colitis and rat Crohn's Disease.

[0392] In Vivo Evaluation of GLP2-2G-XTEN-AE864 in Normal Rats

[0393] To determine the intestinotrophic properties of GLP2-XTEN, small intestine growth in rats was measured as a primary pharmacodynamic endpoint. GLP2-2G-XTEN-AE864 fusion protein, GLP2-2G peptide, or vehicle was administered via subcutaneous injection into male Sprague-Dawley rats weighing 200-220 grams (10-12 rats per group). GLP2-2G peptide was dosed using the previously published regimen of 12.5 nmol/kg (0.05 mg/kg) twice daily for 12 days. GLP2-2G-XTEN was dosed at 25 nmol/kg once daily for 12 days. After sacrifice, a midline incision was made, the small intestines were removed, stretched to their maximum length and the length recorded. The fecal material was flushed from the lumen and the small intestinal wet weight recorded. The small intestine length and weight data were analyzed with an ANOVA model with a Tukey/Kramer post-hoc test for pairwise comparisons, with significance at p=0.05.

[0394] Results:

[0395] Treatment with GLP2-2G peptide for 12 days (12.5 nmol/kg/dose using the standard twice daily dosing regimen) resulted in a significant increase in small intestine weight of 24% (FIG. 18A). There were no significant effects on small intestine length. Administration of equal moles GLP2-2G-XTEN over the 12 day study (25 nmol/kg/dose, once daily) resulted in a similar significant increase in small intestine weight of 31%. In contrast to the results seen with GLP2-2G peptide, the small intestine of GLP2-2G-XTEN treated rats showed a significant increase in length of 9% (10 cm), and was visibly thicker than the tissues from vehicle-treated control animals. (FIG. 18).

[0396] Conclusions:

[0397] The results of the study show that GLP2-2G-XTEN induced small intestine growth that was as good or better than GLP2-2G peptide, using equal nmol/kg dosing.

[0398] In Vivo Evaluation of GLP2-2G-XTEN-AE864 in Murine Acute DSS-Induced Colitis Model

[0399] To determine the efficacy of GLP2-XTEN, the GLP2-2G-XTEN-AE864 fusion protein was evaluated in a mouse model of intestinal inflammatory colitis. Intestinal colitis was induced in female C57Bl/6 mice (9-10 weeks of age) by feeding mice with 4.5% dextran sodium sulfate (DSS) dissolved in drinking water for 10 days, until ˜20% body weight loss is observed. A naïve, non-treated control group (group 1) was given normal drinking water for the duration of the experiment. The DSS treated groups (groups 2-7) were treated SC with vehicle (group2), GLP2-2G peptide (no XTEN) (group 3) or GLP2-2G-XTEN (lot AP5100 (groups 4-7). The treatment doses and regimens are outlined in Table 18, below; the GLP-2G peptide was administered BID days 1-10 while the fusion protein was administered QD in the morning with vehicle control administered in the evening days 1-10. Measured parameters included body weights (recorded daily) and the following terminal endpoints, determine at day 10 of the experiment: colon weight and length, small intestine weight and length, and stomach weight. Tissues were fixed in formalin and then transferred to ethanol for staining and histopathology. The anatomical data was analyzed with an ANOVA model with a Tukey/Kramer post-hoc test for pairwise comparisons, with significance at p=0.05.

TABLE 18
Treatment groups

| GROUP | N | Treatment | Dose | | Route | Regimen |
|---|---|---|---|---|---|---|
| 1 | 10 | Normal | NA | | SC | BID (10-12 h) |
| | | water + Vehicle | | | | |
| 2 | 10 | DSS + Vehicle | | | SC | BID (10-12 h) |
| 3 | 10 | DSS + GLP2- | 0.05 | mg/kg | SC | BID (10-12 h) |
| | | 2G peptide | (12.5 | nmol/kg) | | |
| 4 | 10 | DSS + GLP2- | 6 | mg/kg | SC | Fusion |
| | | 2G-XTEN | (75 | nmol/kg) | | protein AM |
| | | | | | | Vehicle PM |
| 5 | 10 | DSS + GLP2- | 2 | mg/kg | SC | Fusion |
| | | 2G-XTEN | (25 | nmol/kg) | | protein AM |
| | | | | | | Vehicle PM |
| 6 | 10 | DSS + GLP2- | 0.2 | mg/kg | SC | Fusion |
| | | 2G-XTEN | (2.5 | nmol/kg) | | protein AM |
| | | | | | | Vehicle PM |
| 7 | 10 | DSS + GLP2- | 0.02 | mg/kg | SC | Fusion |
| | | 2G-XTEN | (0.25 | nmol/kg) | | protein AM |
| | | | | | | Vehicle PM |

[0400] Results:

[0401] Treatment effects on body weight colon length and weight, small intestine weight and length and stomach weight were assessed on the day of sacrifice. Although DSS-treated mice showed the expected significant decrease in body weight as compared to the control mice (see FIG. 19), neither the mice treated with GLP2-2G peptide nor any of the groups of mice treated with any dose of GLP2-2G-XTEN mice showed a reduced loss of body weight loss over the course of the experiment. With respect to treatment effects on colon, small intestine and stomach, the parameter with a statistically significant change was an increase in small intestine weight in the GLP2-2G-XTEN high dose group (6 mg/kg), compared to the control groups 1 and 2 and the GLP2-2G-XTEN medium dose group (2 mg/kg), compared to group 1 (data not shown). The GLP2-2G peptide did not induce significant growth in the assayed tissues in the current study. Histopathology examination was performed on group 2 (DSS/vehicle treated) and group4 (DSS/GLP2-2G-XTEN 6 mg/kg qd treated). Results of the examination indicated that small intestine samples from the vehicle treated mice show mild-moderate and marked degrees of mucosal atrophy (see FIG. 20A, B). The mucosa were sparsely lined by stunted villi (diminished height) and decreased mucosal thickness. In contrast, small intestine samples from mice treated with GLP2-2G-XTEN at 6 mg/kg qd showed normal mucosal architecture with elongated villi densely populated with columnar epithelial and goblet cells (see FIG. 20C, D). The results support the conclusion that, under the conditions of the experiment, treatment with the GLP2-2G-XTEN fusion protein protected the intestines from the inflammatory effects of DSS, with maintenance of normal villi and mucosal architecture.

[0402] Efficacy of GLP2-2G-XTEN Vs. GLP2-2G Peptide in Rat Crohn's Disease Indomethacin Induced Inflammation Model

[0403] To determine the efficacy of GLP2-XTEN using single dose or qd dosing, the GLP2-2G-XTEN-AE864 fusion protein was evaluated in a rat model of Crohn's Disease of indomethacin-induced intestinal inflammation in three separate studies.

[0404] Study 1:

[0405] Intestinal inflammation was induced in eighty male Wistar rats (Harlan Sprague Dawley) using indomethacin administered on Days 0 and 1 of the experiment. The rats were divided into seven treatment groups for treatment according to Table 19.

TABLE 19
Treatment groups

| | | | | | | +Indo- |
|---|---|---|---|---|---|---|
| GROUP | Treatment | Dose | | Route | Regimen | methacin |
| 1 | Vehicle | 10 | ml/kg | SC | BID | No |
| 2 | Vehicle | 10 | ml/kg | SC | BID | Yes |
| 3 | GLP2-2G | 0.05 | mg/kg | SC | BID | Yes |
| | | (12.5 | nmol/kg) | | | |
| 4 | GLP2-2G | 0.5 | mg/kg | SC | BID | Yes |
| | | (125 | nmol/kg) | | | |
| 5 | GLP2-2G- | 2 | mg/kg | SC | QD | Yes |
| | XTEN | (25 | nmol/kg) | | | |
| 6 | GLP2-2G- | 6 | mg/kg | SC | QD | Yes |
| | XTEN | (75 | nmol/kg) | | | |
| 7 | Prednisolone | 10 | mg/kg | PO | QD | Yes |

[0406] All treatments were administered per the schedule starting on Day −3 of the experiment. Body weights were determined daily. Groups 3 and 5 were dosed equimolar/day. On Day 2 (24 hours post-2nd indomethacin dose), the animals were prepped for sacrifice and analysis. Thirty minutes prior to sacrifice, the rats were injected intravenously with 1 ml 1% Evans Blue dye, in order to visualize ulcers and extent of inflammation by histopathology analysis. The rats were anesthetized (SOP 1810), blood samples were removed to determine the concentration of GLP-2-2G-XTEN using the anti-XTEN/anti-GLP2 ELISA method. The rats were euthanized then necropsied and scored by gross examination of the intestines for the presence of adhesions; i.e., none=0, mild=1, moderate=2, or severe=3. The small intestines were removed and the length of each was recorded. In each small intestine, a longitudinal incision was made and the interior was examined. The degree and length of the ulcerated area was recorded as a score; i.e., none=0, few=1, multiple=2, or continuous=3. For TNFα determination, intestinal samples were thawed and homogenized in a total of 20 ml with DPBS. The supernatants were equilibrated to room temperature and assayed for TNFα by ELISA (R&D Systems, Cat. RTA00, lot 281687, exp. 07SEP11). The samples for Group 1 were assayed undiluted. The samples for Groups 2-7 were diluted 1:4. For histopathology, the small intestines were gently washed with saline to remove the fecal material and were blotted to remove excess fluid. Each small intestine was weighed then processed for histopathology examination to quantitate the degree of inflammation; i.e., 0.0%=0, 1-33%=1, 34-66%=2, 67-100%=3.

[0407] Results:

[0408] The values and scores for the body weight and various small intestine parameters are presented graphically in FIG. 21. The changes in parameters and scores for Group 2 control animals versus Group 1 healthy controls indicates that the model is representative of the disease process. Results of body weights (FIG. 21A) indicate that the GLP2-2G did not have a significant increase in body weight compared to disease control (Group 2), while the GLP-2-2G-XTEN groups demonstrated a significant increase. Results from the small intestine length (FIG. 21B) showed a significant increase for both the GLP-2-2G peptide and GLP-2-2G-XTEN fusion protein treatments, with the latter resulting in length equivalent to the non-diseased control (Group 1). Results from the small intestine weight (FIG. 21C) showed a significant increase for the 0.5 mg/kg GLP-2-2G peptide and both GLP-2-2G-XTEN fusion protein groups, compared to diseased control Group 2. Based on gross pathology scoring of the small intestine, both the GLP-2-2G peptide and GLP-2-2G-XTEN fusion protein treatments resulted in significant decreases in ulceration (FIG. 21D), with the 6 mg/kg fusion protein resulting in a score that was not significantly different from the non-diseased control (Group 1). Based on scoring of adhesions and transulceration (FIG. 21E), both the GLP-2-2G peptide and GLP-2-2G-XTEN fusion protein treatments showed significant decreases compared to diseased control (Group 2), with the 2 and 6 mg/kg fusion protein resulting in scores that were not significantly different from the non-diseased control (Group 1). Based on scoring of small intestine inflammation (FIG. 21F), neither the GLP-2-2G peptide nor the GLP-2-2G-XTEN fusion protein treatments showed a significant effect on inflammation. Based on TNFα assays (FIG. 21G), both the GLP-2-2G peptide and GLP-2-2G-XTEN fusion protein treatments showed significantly decreased cytokine levels compared to the diseased control Group 2.

[0409] Conclusions:

[0410] The results of the study show that GLP2-2G-XTEN provided efficacy that was as good or better than GLP2-2G peptide, using equal nmol/kg dosing, in improving indomethacin-induced small intestine damage.

[0411] Study 2:

[0412] Intestinal inflammation was induced in eighty male Wistar rats (Harlan Sprague Dawley) using indomethacin administered on Days 0 and 1 of the experiment. The rats were divided into eight treatment groups for treatment according to Table 20.

TABLE 20
Treatment groups

| | | | | | | +Indo- |
|---|---|---|---|---|---|---|
| GROUP | Treatment | Dose | | Route | Regimen | methacin |
| 1 | Vehicle | 10 | ml/kg | SC | BID | No |
| 2 | Vehicle | 10 | ml/kg | SC | BID | Yes |
| | | 0.05 | mg/kg | | | |
| 3 | GLP2-2G | (12.5 | nmol/kg) | SC | BID | Yes |
| 4 | GLP2-2G- | 2 | mg/kg | SC | Once daily | Yes |
| | XTEN | (25 | nmol/kg) | | (QD) | |
| 5 | GLP2-2G- | 0.22 | mg/kg | SC | Once day | Yes |
| | XTEN | (2.5 | nmol/kg) | | −3 only | |
| 6 | GLP2-2G- | 0.66 | mg/kg | SC | Once day | Yes |
| | XTEN | (7.5 | nmol/kg) | | −3 only | |
| 7 | GLP2-2G- | 2 | mg/kg | SC | Once day | Yes |
| | XTEN | (25 | nmol/kg) | | −3 only | |
| 8 | GLP2-2G- | 6 | mg/kg | SC | Once day | Yes |
| | XTEN | (75 | nmol/kg) | | −3 only | |

[0413] All treatments were administered per the schedule starting on Day −3 of the experiment. Body weights were determined daily. On Day 2 (24 hours post-2nd indomethacin dose), the animals were prepped for sacrifice and analysis. Thirty minutes prior to sacrifice, the rats were injected intravenously with 1 ml 1% Evans Blue dye, in order to visualize ulcers and extent of inflammation by histopathology analysis. The rats were anesthetized and blood samples were removed to determine the concentration of GLP-2-2G-XTEN using the anti-XTEN/anti-GLP2 ELISA method. The rats were euthanized then necropsied and scored by gross examination of the intestines for the presence of adhesions; i.e., none=0, mild=1, moderate=2, or severe=3. The small intestines were removed and the length of each was recorded. In each small intestine, a longitudinal incision was made and the interior was examined. The degree and length of the ulcerated area was recorded as a score; i.e., none=0, few=1, multiple=2, or continuous=3. The fecal material was washed away with saline and blotted to remove excess fluid and each small intestine was weighed then processed for histopathology examination to quantitate the degree of inflammation; i.e., 0.0%=0, 1-33%=1, 34-66%=2, 67-100%=3.

[0414] Results:

[0415] The scores for the various parameters are presented graphically in FIG. 22. In the vehicle negative control group, the gross pathologic changes due to indomethacin treatment were most severe in the ileum and jejunum, with a total disease score of 8.5-9 by assessment of this group. Of the various GLP-2-2G peptide and GLP-2-2G-XTEN treatment groups, the GLP-2-2G peptide delivered bid, the GLP-2-2G-XTEN delivered qd, and the single doses of GLP-2-2G-XTEN at 6 or 2 mg/kg resulted in significantly improved scores compared to the indomethacin-treated vehicle control group. In the trans-ulceration scores, the same treatment groups as per the total disease score reached statistical significance (FIG. 22A, with star indicating statistically significant difference compared to vehicle group). In the adhesions score analysis, the indomethacin-treated vehicle control group approached the maximum score of 3 (FIG. 22B). Once-daily treatment with the GLP-2-2G-XTEN provided nearly complete protection from adhesions, and the single high-dose 6 mg/kg GLP-2-2G-XTEN group reached statistically significant difference compared to vehicle control (star in figure indicating statistically significant difference), as did the daily bid dosed GLP-2-2G peptide group. In the small intestine length analysis (with the non-indomethacin treated group normalized to 100%), the once-daily treatment with the GLP-2-2G-XTEN group and the daily bid dosed GLP-2-2G peptide group reached statistically significant difference compared to indomethacin-treated vehicle control group. The histopathology assessment finding were essentially similar to the gross pathology findings. The histopathologic changes in the vehicle control group due to indomethacin treatment were most severe in the ileum and jejunum. The vehicle control group showed severe mucosal atrophy, ulceration and infiltration (FIG. 23A). The protective effects of the daily bid GLP-2-2G peptide and once-daily GLP-2-2G-XTEN treatments were most pronounced in the ileum, but were also seen in the jejunum. Group 3 had one rat with essentially normal tissue (FIG. 23B) while two rats each showed ulceration and infiltration but no atrophy and two rats had histopathologic changes similar to the vehicle control disease group 2. Group 4 (FIG. 23D) showed protective effects with two rats with essentially normal tissue, one rat showing no atrophy or ulceration but with slight infiltration, one rat with no atrophy but slight ulceration and infiltration, and one rat had histopathologic changes similar to the vehicle control disease group 2. Group 7 showed protective effects with one rat with essentially normal tissue, two rats with no ulceration or infiltration but showing muscular atrophy, and two rats had histopathologic changes similar to the vehicle control disease group 2. Group 8 (FIG. 23C) showed protective effects with one rat with no ulceration or infiltration, one rat with reduced ulceration and infiltration, and three rats had histopathologic changes similar to the vehicle control disease group 2. The ELISA results indicate that the GLP-2-2G-XTEN fusion protein was detectable at Day 2 in all animals of Group 4 and Group 8, and three rats in Group 7.

[0416] The results support the conclusion that, under the conditions of the experiment, treatment with the GLP2-2G-XTEN fusion protein provided significant protection to the intestines from the inflammatory effects of indomethacin, with daily dosing at 2 mg/kg showing the greatest efficacy and single doses of 6 mg/kg or 2 mg/kg showing significant efficacy in some parameters.

[0417] Study 3:

[0418] A third indomethacin-induced inflammation study was performed to verify previous results and test additional dose regimens. Intestinal inflammation was induced in male Wistar rats (Harlan Sprague Dawley) using indomethacin administered on Days 0 and 1 of the experiment according to Table 21.

TABLE 21
Treatment groups

| GROUP | Treatment | Dose | | Route | Regimen | Total Dose |
|---|---|---|---|---|---|---|
| 1 | Vehicle | 10 | ml/kg | SC | QD | ND |
| 2 | GLP2-2G | 0.05 | mg/kg | SC | BID | 125 nmol/kg |
| | | (12.5 | nmol/kg) | | | |
| 3 | GLP2-2G- | 2 | mg/kg | SC | Once | 125 nmol/kg |
| | XTEN | (25 | nmol/kg) | | daily | |
| | | | | | (QD) | |
| 4 | GLP2-2G- | 2 | mg/kg | SC | Day −3, | 75 nmol/kg |
| | XTEN | (25 | nmol/kg) | | −1, 1 | |
| | | | | | (Q2D) | |
| 5 | GLP2-2G- | 6 | mg/kg | SC | Once | 75 nmol/kg |
| | XTEN | (75 | nmol/kg) | | day | |
| | | | | | −3 only | |

[0419] All treatments were administered per the schedule starting on Day −3 of the experiment. Body weights were determined daily. On Day 2 (24 hours post-2nd indomethacin dose), the animals were prepped for sacrifice and analysis. The small intestines were removed and the length of each was recorded. Quantitative histopathology was performed on a subset of samples. Rat small intestine samples consisted of a 3 cm section of proximal jejunum and a 3 cm section of mid jejunum collected 15 cm and 30 cm from the pylorus, respectively. Samples were fixed in 10% neutral buffered formalin. Samples were trimmed into multiple sections without bias toward lesion presence or absence. These sections were placed in cassettes, embedded in paraffin, microtomed at approximately 4 microns thickness, and stained with hematoxylin and eosin (H&E). The slides were evaluated microscopically by a board certified veterinary pathologist and scored for villous height as well as infiltration/inflammation, mucosal atrophy, villi/crypt appearance, abscesses/ulceration. A 1 to 4 severity grading scale was used, where 1=minimal, 2=mild, 3=moderate, 4=marked/severe, reflecting the combination of the cellular reactions seen histopathologically Small intestine length was analyzed with an ANOVA model with a Tukey/Kramer post-hoc test for pairwise comparisons, with significance at p=0.05. Non-parametric histology score variables were compared with the vehicle control using a Mann Whitney U test with a Bonferroni correction for the p-value to create an overall alpha of 0.05.

[0420] Results:

[0421] As seen in the initial studies, there was an increase in small intestine length in the GLP2-2G-XTEN-treated diseased rats as compared to vehicle-treated diseased rats (FIG. 24A). This increase correlated with a significant increase in villi height (FIG. 24B). Both high (total dose of 125 nmol/kg) and low (total dose of 75 nmol/kg) dose GLP2-2G-XTEN-treated groups showed a significant increase in villi height; the increase in villi height seen in peptide treated rats was not significant. There was also a significant decrease in mucosal atrophy as both high and low dose GLP2-2G-XTEN-treated rats showed a significantly lower mucosal atrophy score than vehicle-treated diseased rats (FIG. 24C). Although there was a trend showing a reduction in mucosal ulceration and mixed cell infiltrate following GLP2-2G-XTEN and GLP2-2G peptide treatment, these results were not significant for any of the three treatment groups.

[0422] Conclusions:

[0423] Histopathological results support the conclusion that GLP2-2G-XTEN provided efficacy that was as good or better than GLP2-2G peptide in improving indomethacin-induced small intestine damage. Furthermore, GLP2-2G-XTEN dosed once at 75 nmol/kg or three times at 25 nmol/kg is as effective as GLP2-2G peptide dosed ten times at 12.5 nmol/kg.

### Example 22: Human Clinical Trial Designs for Evaluating GLP2-XTEN Comprising GLP-2

[0424] As demonstrated in Examples 18-20, fusion of XTEN to the C-terminus of GLP-2-2glycine results in improved half-life compared to that known for the native form of the GLP-2 or the GLP-2-2G peptide, which, it is believed, would enable a reduced dosing frequency yet still result in clinical efficacy when using such GLP2-XTEN-containing fusion protein compositions. Clinical trials in humans comparing a GLP2-XTEN fusion protein to GLP-2 (or GLP-2-2G peptide) formulations are performed to establish the efficacy and advantages, compared to current or experimental modalities, of the GLP2-XTEN binding fusion protein compositions. Such studies comprise three phases. First, a Phase I safety and pharmacokinetics study in adult patients is conducted to determine the maximum tolerated dose and pharmacokinetics and pharmacodynamics in humans (e.g., normal healthy volunteer subjects), as well as to define potential toxicities and adverse events to be tracked in future studies. A Phase I study is conducted in which single rising doses of a GLP2-XTEN composition, such as are disclosed herein, are administered by the desired route (e.g., by subcutaneous, intramuscular, or intravenous routes) and biochemical, PK, and clinical parameters are measured at defined intervals, as well as adverse events. A Phase Ib study will multiple doses would follow, also measuring the biochemical, PK, and clinical parameters at defined intervals. This would permit the determination of the minimum effective dose and the maximum tolerated dose and establishes the threshold and maximum concentrations in dosage and circulating drug that constitute the therapeutic window for the active component. From this information, the dose and dose schedule that permits less frequent administration of the GLP2-XTEN compositions (compared to GLP-2 not linked to XTEN), yet retains the pharmacologic response, is obtained. Thereafter, Phase II and III clinical trials are conducted in patients with the GLP-2 associated condition, verifying the effectiveness and safety of the GLP2-XTEN compositions under the dose conditions. Clinical trials could be conducted in patients suffering from any disease in which native GLP-2 or the standard of care for the given condition may be expected to provide clinical benefit. For example, such indications include gastritis, digestion disorders, malabsorption syndrome, short-gut syndrome, short bowel syndrome, cul-de-sac syndrome, inflammatory bowel disease, celiac disease, tropical sprue, hypogammaglobulinemic sprue, Crohn's disease, ulcerative colitis, enteritis, chemotherapy-induced enteritis, irritable bowel syndrome, small intestine damage, mucosal damage of the small intestine, small intestinal damage due to cancer-chemotherapy, gastrointestinal injury, diarrheal diseases, intestinal insufficiency, acid-induced intestinal injury, arginine deficiency, idiopathic hypospermia, obesity, catabolic illness, febrile neutropenia, diabetes, obesity, steatorrhea, autoimmune diseases, food allergies, hypoglycemia, gastrointestinal barrier disorders, sepsis, bacterial peritonitis, burn-induced intestinal damage, decreased gastrointestinal motility, intestinal failure, chemotherapy-associated bacteremia, bowel trauma, bowel ischemia, mesenteric ischemia, malnutrition, necrotizing enterocolitis, necrotizing pancreatitis, neonatal feeding intolerance, NSAID-induced gastrointestinal damage, nutritional insufficiency, total parenteral nutrition damage to gastrointestinal tract, neonatal nutritional insufficiency, radiation-induced enteritis, radiation-induced injury to the intestines, mucositis, pouchitis, ischemia, and stroke. Trials monitor patients before, during and after treatment for changes in physiologic and clinical parameters associated with the respective indications; e.g., weight gain, inflammation, cytokine levels, pain, bowel function, appetite, febrile episodes, wound healing, glucose levels; enhancing or accelerating hunger satiety; parameters that are tracked relative to the placebo or positive control groups. Efficacy outcomes are determined using standard statistical methods. Toxicity and adverse event markers are also followed in the study to verify that the compound is safe when used in the manner described.

### Example 23: GLP2-XTEN with Cleavage Sequences

[0425] C-Terminal XTEN Releasable by FXIa

[0426] An GLP2-XTEN fusion protein consisting of an XTEN protein fused to the C-terminus of GLP-2 can be created with a XTEN release site cleavage sequence placed in between the GLP-2 and XTEN components, as depicted in FIG. 7. Exemplary sequences are provided in Table 34. In this case, the release site cleavage sequence can be incorporated into the GLP2-XTEN that contains an amino acid sequence that is recognized and cleaved by the FXIa protease (EC 3.4.21.27, Uniprot P03951). Specifically the amino acid sequence KLTRAET (SEQ ID NO: 684) is cut after the arginine of the sequence by FXIa protease. FXI is the pro-coagulant protease located immediately before FVIII in the intrinsic or contact activated coagulation pathway. Active FXIa is produced from FXI by proteolytic cleavage of the zymogen by FXIIa. Production of FXIa is tightly controlled and only occurs when coagulation is necessary for proper hemostasis. Therefore, by incorporation of the KLTRAET (SEQ ID NO: 684) cleavage sequence, the XTEN domain is removed from GLP-2 concurrent with activation of the intrinsic coagulation pathway in proximity to the GLP2-XTEN.

[0427] C-Terminal XTEN Releasable by Elastase-2

[0428] An GLP2-XTEN fusion protein consisting of an XTEN protein fused to the C-terminus of GLP-2 can be created with a XTEN release site cleavage sequence placed in between the GLP-2 and XTEN components, as depicted in FIG. 7. Exemplary sequences are provided in Table 34. In this case, the release site contains an amino acid sequence that is recognized and cleaved by the elastase-2 protease (EC 3.4.21.37, Uniprot P08246). Specifically the sequence LGPVSGVP (SEQ ID NO: 685) [Rawlings N. D., et al. (2008) Nucleic Acids Res., 36: D320], is cut after position 4 in the sequence. Elastase is constitutively expressed by neutrophils and is present at all times in the circulation, but particularly during acute inflammation. Therefore as the long lived GLP2-XTEN circulates, a fraction of it is cleaved, particularly locally during inflammatory responses (e.g., inflammation of the bowel), creating a pool of shorter-lived GLP-2 at the site of inflammation, e.g., in Crohn's Disease, where the GLP-2 is most needed.

[0429] C-Terminal XTEN Releasable by MMP-12

[0430] An GLP2-XTEN fusion protein consisting of an XTEN protein fused to the C-terminus of GLP-2 can be created with a XTEN release site cleavage sequence placed in between the GLP-2 and XTEN components, as depicted in FIG. 7. Exemplary sequences are provided in Table 34. In this case, the release site contains an amino acid sequence that is recognized and cleaved by the MMP-12 protease (EC 3.4.24.65, Uniprot P39900). Specifically the sequence GPAGLGGA (SEQ ID NO: 686) [Rawlings N.D., et al. (2008) Nucleic Acids Res., 36: D320], is cut after position 4 of the sequence. MMP-12 is constitutively expressed in whole blood. Therefore as the GLP2-XTEN circulates, a fraction of it is cleaved, creating a pool of shorter-lived GLP-2 to be used. In a desirable feature of the inventive composition, this creates a circulating pro-drug depot that constantly releases a prophylactic amount of GLP-2, with higher amounts released during an inflammatory response, e.g., in Crohn's Disease, where the GLP-2 is most needed.

[0431] C-Terminal XTEN Releasable by MMP-13

[0432] An GLP2-XTEN fusion protein consisting of an XTEN protein fused to the C-terminus of GLP-2 can be created with a XTEN release site cleavage sequence placed in between the GLP-2 and XTEN components, as depicted in FIG. 7. Exemplary sequences are provided in Table 34. In this case, the release site contains an amino acid sequence that is recognized and cleaved by the MMP-13 protease (EC 3.4.24.-, Uniprot P45452). Specifically the sequence GPAGLRGA (SEQ ID NO: 687) [Rawlings N.D., et al. (2008) Nucleic Acids Res., 36: D320], is cut after position 4. MMP-13 is constitutively expressed in whole blood. Therefore as the long lived GLP2-XTEN circulates, a fraction of it is cleaved, creating a pool of shorter-lived GLP-2 to be used. In a desirable feature of the inventive composition, this creates a circulating pro-drug depot that constantly releases a prophylactic amount of GLP-2, with higher amounts released during an inflammatory response, e.g., in Crohn's Disease, where the GLP-2 is most needed.

[0433] C-Terminal XTEN Releasable by MMP-17

[0434] A GLP2-XTEN fusion protein consisting of an XTEN protein fused to the C-terminus of GLP-2 can be created with a XTEN release site cleavage sequence placed in between the GLP-2 and XTEN components, as depicted in FIG. 7. Exemplary sequences are provided in Table 34. In this case, the release site contains an amino acid sequence that is recognized and cleaved by the MMP-20 protease (EC.3.4.24.-, Uniprot Q9ULZ9). Specifically the sequence APLGLRLR (SEQ ID NO: 688) [Rawlings N.D., et al. (2008) Nucleic Acids Res., 36: D320], is cut after position 4 in the sequence. MMP-17 is constitutively expressed in whole blood. Therefore as the GLP2-XTEN circulates, a fraction of it is cleaved, creating a pool of shorter-lived GLP-2 to be used. In a desirable feature of the inventive composition, this creates a circulating pro-drug depot that constantly releases a prophylactic amount of GLP-2, with higher amounts released during an inflammatory response, e.g., in Crohn's Disease, where the GLP-2 is most needed.

[0435] C-Terminal XTEN Releasable by MMP-20

[0436] A GLP2-XTEN fusion protein consisting of an XTEN protein fused to the C-terminus of GLP-2 can be created with a XTEN release site cleavage sequence placed in between the GLP-2 and XTEN components, as depicted in FIG. 7. Exemplary sequences are provided in Table 34. In this case, the release site contains an amino acid sequence that is recognized and cleaved by the MMP-20 protease (EC.3.4.24.-, Uniprot 060882). Specifically the sequence PALPLVAQ (SEQ ID NO: 689) [Rawlings N.D., et al. (2008) Nucleic Acids Res., 36: D320], is cut after position 4 (depicted by the arrow). MMP-20 is constitutively expressed in whole blood. Therefore as the GLP2-XTEN circulates, a fraction of it is cleaved, creating a pool of shorter-lived GLP-2 to be used. In a desirable feature of the inventive composition, this creates a circulating pro-drug depot that constantly releases a prophylactic amount of GLP-2, with higher amounts released during an inflammatory response, e.g., in Crohn's Disease, where the GLP-2 is most needed.

[0437] Optimization of the Release Rate of C-Terminal XTEN

[0438] Variants of the foregoing constructs of the Examples can be created in which the release rate of C-terminal XTEN is altered. As the rate of XTEN release by an XTEN release protease is dependent on the sequence of the XTEN release site, by varying the amino acid sequence in the XTEN release site one can control the rate of XTEN release. The sequence specificity of many proteases is well known in the art, and is documented in several data bases. In this case, the amino acid specificity of proteases is mapped using combinatorial libraries of substrates [Harris, J L, et al. (2000) Proc Natl Acad Sci USA, 97: 7754] or by following the cleavage of substrate mixtures as illustrated in [Schellenberger, V, et al. (1993) Biochemistry, 32: 4344]. An alternative is the identification of optimal protease cleavage sequences by phage display [Matthews, D., et al. (1993) Science, 260: 1113]. Constructs are made with variant sequences and assayed for XTEN release using standard assays for detection of the XTEN.

### Example 24: Biodistribution of Large XTEN Molecules

[0439] To verify that constructs with long XTEN fusions can penetrate into tissue, the biodistribution of three fluorescently tagged constructs were tested in mice, aHer2-XTEN-864-Alexa 680, aHer2-XTEN-576-Alexa 680, and aHer2-XTEN-288-Alexa 680, using fluorescence imaging. The aHer2 payload is a scFv fragment specific for binding the Her2 antigen, which is not found on normal tissues (and hence should not affect biodistribution in normal animals). This study also included fluorescently tagged Herceptin-Alexa 680 as a control antibody. The mice were given a single intravenous injection of each agent. After 72 hours, all groups were euthanized and liver, lung, heart, spleen and kidneys were ex vivo imaged using fluorescence imaging. The data are shown Table 22.

[0440] Conclusions:

[0441] All constructs showed significant penetration into all tissues assayed. The lower overall fluorescence signals of the XTEN_576 and XTEN_288 groups are attributed to the increased clearance of the shorter XTEN constructs over the 72 hour distribution period. Similar proportions for lung fluorescence relative to total signal were observed for all groups, including the antibody control, supporting that XTEN fusion protein constructs are bioavailable in tissue under these conditions.

TABLE 22
Fluorescence Signals by Organ

| | Dose | Total Fluorescence Efficiency | | | | |
|---|---|---|---|---|---|---|
| | (nmol/ | (group mean) (×1e−6) | | | | |
| Test Material | mouse) | Heart | Lungs | Spleen | Liver | Kidney |
| scFv-XTEN- | 6.7 | 28 | 130 | 16 | 180 | 120 |
| 864-Alexa 680 | | | | | | |
| scFv-XTEN- | 6.7 | 6.8 | 24 | 3.4 | 48 | 31 |
| 576-Alexa 680 | | | | | | |
| scFv-XTEN- | 6.7 | 1.9 | 5.6 | 2.1 | 20 | 34 |
| 288-Alexa 680 | | | | | | |
| mAb-Alexa680 | 3.3 | 32 | 150 | 25 | 370 | 110 |
| Control | | | | | | |

### Example 25: Analytical Size Exclusion Chromatography of XTEN Fusion Proteins with Diverse Payloads

[0442] Size exclusion chromatography analyses were performed on fusion proteins containing various therapeutic proteins and unstructured recombinant proteins of increasing length. An exemplary assay used a TSKGel-G4000 SWXL (7.8 mm×30 cm) column in which 40 μg of purified glucagon fusion protein at a concentration of 1 mg/ml was separated at a flow rate of 0.6 ml/min in 20 mM phosphate pH 6.8, 114 mM NaCl. Chromatogram profiles were monitored using OD214 nm and OD280 nm. Column calibration for all assays were performed using a size exclusion calibration standard from BioRad; the markers include thyroglobulin (670 kDa), bovine gamma-globulin (158 kDa), chicken ovalbumin (44 kDa), equine myoglobuin (17 kDa) and vitamin B12 (1.35 kDa). Representative chromatographic profiles of Glucagon-Y288, Glucagon-Y144, Glucagon-Y72, Glucagon-Y36 are shown as an overlay in FIG. 25. The data show that the apparent molecular weight of each compound is proportional to the length of the attached XTEN sequence. However, the data also show that the apparent molecular weight of each construct is significantly larger than that expected for a globular protein (as shown by comparison to the standard proteins run in the same assay). Based on the SEC analyses for all constructs evaluated, the apparent molecular weights, the apparent molecular weight factor (expressed as the ratio of apparent molecular weight to the calculated molecular weight) and the hydrodynamic radius (RH in nm) are shown in Table 23. The results indicate that incorporation of different XTENs of 576 amino acids or greater confers an apparent molecular weight for the fusion protein of approximately 339 kDa to 760, and that XTEN of 864 amino acids or greater confers an apparent molecular weight greater than at least approximately 800 kDA. The results of proportional increases in apparent molecular weight to actual molecular weight were consistent for fusion proteins created with XTEN from several different motif families; i.e., AD, AE, AF, AG, and AM, with increases of at least four-fold and ratios as high as about 17-fold. Additionally, the incorporation of XTEN fusion partners with 576 amino acids or more into fusion proteins with the various payloads (and 288 residues in the case of glucagon fused to Y288) resulted with a hydrodynamic radius of 7 nm or greater; well beyond the glomerular pore size of approximately 3-5 nm. Accordingly, it is expected that fusion proteins comprising growth and XTEN have reduced renal clearance, contributing to increased terminal half-life and improving the therapeutic or biologic effect relative to a corresponding un-fused biologic payload protein.

TABLE 23
SEC analysis of various polypeptides

| | XTEN or | | Actual | Apparent | Apparent | |
|---|---|---|---|---|---|---|
| Construct | fusion | Therapeutic | MW | MW | Molecular | R_{H} |
| Name | partner | Protein | (kDa) | (kDa) | Weight Factor | (nm) |
| AC14 | Y288 | Glucagon | 28.7 | 370 | 12.9 | 7.0 |
| AC28 | Y144 | Glucagon | 16.1 | 117 | 7.3 | 5.0 |
| AC34 | Y72 | Glucagon | 9.9 | 58.6 | 5.9 | 3.8 |
| AC33 | Y36 | Glucagon | 6.8 | 29.4 | 4.3 | 2.6 |
| AC89 | AF120 | Glucagon | 14.1 | 76.4 | 5.4 | 4.3 |
| AC88 | AF108 | Glucagon | 13.1 | 61.2 | 4.7 | 3.9 |
| AC73 | AF144 | Glucagon | 16.3 | 95.2 | 5.8 | 4.7 |
| AC53 | AG576 | GFP | 74.9 | 339 | 4.5 | 7.0 |
| AC39 | AD576 | GFP | 76.4 | 546 | 7.1 | 7.7 |
| AC41 | AE576 | GFP | 80.4 | 760 | 9.5 | 8.3 |
| AC52 | AF576 | GFP | 78.3 | 526 | 6.7 | 7.6 |
| AC398 | AE288 | FVII | 76.3 | 650 | 8.5 | 8.2 |
| AC404 | AE864 | FVII | 129 | 1900 | 14.7 | 10.1 |
| AC85 | AE864 | Exendin-4 | 83.6 | 938 | 11.2 | 8.9 |
| AC114 | AM875 | Exendin-4 | 82.4 | 1344 | 16.3 | 9.4 |
| AC143 | AM875 | hGH | 100.6 | 846 | 8.4 | 8.7 |
| AC227 | AM875 | IL-1ra | 95.4 | 1103 | 11.6 | 9.2 |
| AC228 | AM1318 | IL-1ra | 134.8 | 2286 | 17.0 | 10.5 |

### Example 26: Pharmacokinetics of Extended Polypeptides Fused to GFP in Cynomolgus Monkeys

[0443] The pharmacokinetics of GFP-L288, GFP-L576, GFP-XTEN_AF576, GFP-XTEN_Y576 and XTEN_AD836-GFP were tested in cynomolgus monkeys to determine the effect of composition and length of the unstructured polypeptides on PK parameters. Blood samples were analyzed at various times after injection and the concentration of GFP in plasma was measured by ELISA using a polyclonal antibody against GFP for capture and a biotinylated preparation of the same polyclonal antibody for detection. Results are summarized in FIG. 26. They show a surprising increase of half-life with increasing length of the XTEN sequence. For example, a half-life of 10 h was determined for GFP-XTEN_L288 (with 288 amino acid residues in the XTEN). Doubling the length of the unstructured polypeptide fusion partner to 576 amino acids increased the half-life to 20-22 h for multiple fusion protein constructs; i.e., GFP-XTEN_L576, GFP-XTEN_AF576, GFP-XTEN_Y576. A further increase of the unstructured polypeptide fusion partner length to 836 residues resulted in a half-life of 72-75 h for XTEN_AD836-GFP. Thus, increasing the polymer length by 288 residues from 288 to 576 residues increased in vivo half-life by about 10 h. However, increasing the polypeptide length by 260 residues from 576 residues to 836 residues increased half-life by more than 50 h. These results show that there is a surprising threshold of unstructured polypeptide length that results in a greater than proportional gain in in vivo half-life. Thus, fusion proteins comprising extended, unstructured polypeptides are expected to have the property of enhanced pharmacokinetics compared to polypeptides of shorter lengths.

### Example 27: Serum Stability of XTEN

[0444] A fusion protein containing XTEN_AE864 fused to the N-terminus of GFP was incubated in monkey plasma and rat kidney lysate for up to 7 days at 37° C. Samples were withdrawn at time 0, Day 1 and Day 7 and analyzed by SDS PAGE followed by detection using Western analysis and detection with antibodies against GFP as shown in FIG. 27. The sequence of XTEN_AE864 showed negligible signs of degradation over 7 days in plasma. However, XTEN_AE864 was rapidly degraded in rat kidney lysate over 3 days. The in vivo stability of the fusion protein was tested in plasma samples wherein the GFP_AE864 was immunoprecipitated and analyzed by SDS PAGE as described above. Samples that were withdrawn up to 7 days after injection showed very few signs of degradation. The results demonstrate the resistance of GLP2-XTEN to degradation due to serum proteases; a factor in the enhancement of pharmacokinetic properties of the GLP2-XTEN fusion proteins.

### Example 28: Increasing Solubility and Stability of a Peptide Payload by Linking to XTEN

[0445] In order to evaluate the ability of XTEN to enhance the physicochemical properties of solubility and stability, fusion proteins of glucagon plus shorter-length XTEN were prepared and evaluated. The test articles were prepared in Tris-buffered saline at neutral pH and characterization of the Gcg-XTEN solution was by reverse-phase HPLC and size exclusion chromatography to affirm that the protein was homogeneous and non-aggregated in solution. The data are presented in Table 24. For comparative purposes, the solubility limit of unmodified glucagon in the same buffer was measured at 60 μM (0.2 mg/mL), and the result demonstrate that for all lengths of XTEN added, a substantial increase in solubility was attained. Importantly, in most cases the glucagon-XTEN fusion proteins were prepared to achieve target concentrations and were not evaluated to determine the maximum solubility limits for the given construct. However, in the case of glucagon linked to the AF-144 XTEN, the limit of solubility was determined, with the result that a 60-fold increase in solubility was achieved, compared to glucagon not linked to XTEN. In addition, the glucagon-AF144 GLP2-XTEN was evaluated for stability, and was found to be stable in liquid formulation for at least 6 months under refrigerated conditions and for approximately one month at 37° C. (data not shown).

[0446] The data support the conclusion that the linking of short-length XTEN polypeptides to a biologically active protein such as glucagon can markedly enhance the solubility properties of the protein by the resulting fusion protein, as well as confer stability at the higher protein concentrations.

TABLE 24
Solubility of Glucagon-XTEN constructs

| Test Article | Solubility | |
|---|---|---|
| Glucagon | 60 | μM |
| Glucagon-Y36 | >370 | μM |
| Glucagon-Y72 | >293 | μM |
| Glucagon-AF108 | >145 | μM |
| Glucagon-AF120 | >160 | μM |
| Glucagon-Y144 | >497 | μM |
| Glucagon-AE144 | >467 | μM |
| Glucagon-AF144 | >3600 | μM |
| Glucagon-Y288 | >163 | μM |

### Example 29: Analysis of Sequences for Secondary Structure by Prediction Algorithms

[0447] Amino acid sequences can be assessed for secondary structure via certain computer programs or algorithms, such as the well-known Chou-Fasman algorithm (Chou, P. Y., et al. (1974) Biochemistry, 13: 222-45) and the Garnier-Osguthorpe-Robson, or “GOR” method (Gamier J, Gibrat J F, Robson B. (1996). GOR method for predicting protein secondary structure from amino acid sequence. Methods Enzymol 266:540-553). For a given sequence, the algorithms can predict whether there exists some or no secondary structure at all, expressed as total and/or percentage of residues of the sequence that form, for example, alpha-helices or beta-sheets or the percentage of residues of the sequence predicted to result in random coil formation.

[0448] Several representative sequences from XTEN “families” have been assessed using two algorithm tools for the Chou-Fasman and GOR methods to assess the degree of secondary structure in these sequences. The Chou-Fasman tool was provided by William R Pearson and the University of Virginia, at the “Biosupport” internet site, URL located on the World Wide Web at fasta.bioch.virginia.edu/fasta_www2/fasta_www.cgi?rm=misc1 as it existed on Jun. 19, 2009. The GOR tool was provided by Pole Informatique Lyonnais at the Network Protein Sequence Analysis internet site, URL located on the World Wide Web at .npsa-pbil.ibcp.fr/cgi-bin/secpred_gor4.pl as it existed on Jun. 19, 2008.

[0449] As a first step in the analyses, a single XTEN sequence was analyzed by the two algorithms. The AE864 composition is a XTEN with 864 amino acid residues created from multiple copies of four 12 amino acid sequence motifs consisting of the amino acids G, S, T, E, P, and A. The sequence motifs are characterized by the fact that there is limited repetitiveness within the motifs and within the overall sequence in that the sequence of any two consecutive amino acids is not repeated more than twice in any one 12 amino acid motif, and that no three contiguous amino acids of full-length the XTEN are identical. Successively longer portions of the AF 864 sequence from the N-terminus were analyzed by the Chou-Fasman and GOR algorithms (the latter requires a minimum length of 17 amino acids). The sequences were analyzed by entering the FASTA format sequences into the prediction tools and running the analysis. The results from the analyses are presented in Table 25.

[0450] The results indicate that, by the Chou-Fasman calculations, short XTEN of the AE and AG families, up to at least 288 amino acid residues, have no alpha-helices or beta sheets, but amounts of predicted percentage of random coil by the GOR algorithm vary from 78-99%. With increasing XTEN lengths of 504 residues to greater than 1300, the XTEN analyzed by the Chou-Fasman algorithm had predicted percentages of alpha-helices or beta sheets of 0 to about 2%, while the calculated percentages of random coil increased to from 94-99%. Those XTEN with alpha-helices or beta sheets were those sequences with one or more instances of three contiguous serine residues, which resulted in predicted beta-sheet formation. However, even these sequences still had approximately 99% random coil formation.

[0451] The data provided herein suggests that 1) XTEN created from multiple sequence motifs of G, S, T, E, P, and A that have limited repetitiveness as to contiguous amino acids are predicted to have very low amounts of alpha-helices and beta-sheets; 2) that increasing the length of the XTEN does not appreciably increase the probability of alpha-helix or beta-sheet formation; and 3) that progressively increasing the length of the XTEN sequence by addition of non-repetitive 12-mers consisting of the amino acids G, S, T, E, P, and A results in increased percentage of random coil formation. Results further indicate that XTEN sequences defined herein (including e.g., XTEN created from sequence motifs of G, S, T, E, P, and A) have limited repetitiveness (including those with no more than two identical contiguous amino acids in any one motif) are expected to have very limited secondary structure. Any order or combination of sequence motifs from Table 3 can be used to create an XTEN polypeptide that will result in an XTEN sequence that is substantially devoid of secondary structure, though three contiguous serines are not preferred. The unfavorable property of three contiguous series however, can be ameliorated by increasing the length of the XTEN. Such sequences are expected to have the characteristics described in the GLP2-XTEN embodiments of the invention disclosed herein.

TABLE 25
CHOU-FASMAN and GOR prediction calculations of polypeptide sequences (SEQ ID
NOS 690-715, respectively, in order of appearance)

| SEQ | | No. | Chou-Fasman | GOR |
|---|---|---|---|---|
| NAME | Sequence | Residues | Calculation | Calculation |
| AE36: | GSPAGSPTSTEEGTSESATPESGPGTST | 36 | Residue totals: H: 0 E: 0 | 94.44% |
| LCW0402002 | EPSEGSAP | | percent: H: 0.0 E: 0.0 | |
| AE36: | GTSTEPSEGSAPGTSTEPSEGSAPGTST | 36 | Residue totals: H: 0 E: 0 | 94.44% |
| LCW0402003 | EPSEGSAP | | percent: H: 0.0 E: 0.0 | |
| AG36: | GASPGTSSTGSPGTPGSGTASSSPGSST | 36 | Residue totals: H: 0 E: 0 | 77.78% |
| LCW0404001 | PSGATGSP | | percent: H: 0.0 E: 0.0 | |
| AG36: | GSSTPSGATGSPGSSPSASTGTGPGSST | 36 | Residue totals: H: 0 E: 0 | 83.33% |
| LCW0404003 | PSGATGSP | | percent: H: 0.0 E: 0.0 | |
| AE42_1 | TEPSEGSAPGSPAGSPTSTEEGTSESAT | 42 | Residue totals: H: 0 E: 0 | 90.48% |
| | PESGPGSEPATSGS | | percent: H: 0.0 E: 0.0 | |
| AE42_1 | TEPSEGSAPGSPAGSPTSTEEGTSESAT | 42 | Residue totals: H: 0 E: 0 | 90.48% |
| | PESGPGSEPATSGS | | percent: H: 0.0 E: 0.0 | |
| AG42_1 | GAPSPSASTGTGPGTPGSGTASSSPGS | 42 | Residue totals: H: 0 E: 0 | 88.10% |
| | STPSGATGSPGPSGP | | percent: H: 0.0 E: 0.0 | |
| AG42_2 | GPGTPGSGTASSSPGSSTPSGATGSPG | 42 | Residue totals: H: 0 E: 0 | 88.10% |
| | SSPSASTGTGPGASP | | percent: H: 0.0 E: 0.0 | |
| AE144 | GSEPATSGSETPGTSESATPESGPGSEP | 144 | Residue totals: H: 0 E: 0 | 98.61% |
| | ATSGSETPGSPAGSPTSTEEGTSTEPSE | | percent: H: 0.0 E: 0.0 | |
| | GSAPGSEPATSGSETPGSEPATSGSETP | | | |
| | GSEPATSGSETPGTSTEPSEGSAPGTSE | | | |
| | SATPESGPGSEPATSGSETPGTSTEPSE | | | |
| | GSAP | | | |
| AG144_1 | PGSSPSASTGTGPGSSPSASTGTGPGTP | 144 | Residue totals: H: 0 E: 0 | 91.67% |
| | GSGTASSSPGSSTPSGATGSPGSSPSAS | | percent: H: 0.0 E: 0.0 | |
| | TGTGPGASPGTSSTGSPGTPGSGTASS | | | |
| | SPGSSTPSGATGSPGTPGSGTASSSPG | | | |
| | ASPGTSSTGSPGASPGTSSTGSPGTPGS | | | |
| | GTASSS | | | |
| AE288 | GTSESATPESGPGSEPATSGSETPGTSE | 288 | Residue totals: H: 0 E: 0 | 99.31% |
| | SATPESGPGSEPATSGSETPGTSESATP | | percent: H: 0.0 E: 0.0 | |
| | ESGPGTSTEPSEGSAPGSPAGSPTSTEE | | | |
| | GTSESATPESGPGSEPATSGSETPGTSE | | | |
| | SATPESGPGSPAGSPTSTEEGSPAGSPT | | | |
| | STEEGTSTEPSEGSAPGTSESATPESGP | | | |
| | GTSESATPESGPGTSESATPESGPGSEP | | | |
| | ATSGSETPGSEPATSGSETPGSPAGSPT | | | |
| | STEEGTSTEPSEGSAPGTSTEPSEGSAP | | | |
| | GSEPATSGSETPGTSESATPESGPGTST | | | |
| | EPSEGSAP | | | |
| AG288_2 | GSSPSASTGTGPGSSPSASTGTGPGTP | 288 | Residue totals: H: 0 E: 0 | 92.71 |
| | GSGTASSSPGSSTPSGATGSPGSSPSAS | | percent: H: 0.0 E: 0.0 | |
| | TGTGPGASPGTSSTGSPGTPGSGTASS | | | |
| | SPGSSTPSGATGSPGTPGSGTASSSPG | | | |
| | ASPGTSSTGSPGASPGTSSTGSPGTPGS | | | |
| | GTASSSPGSSTPSGATGSPGASPGTSST | | | |
| | GSPGTPGSGTASSSPGSSTPSGATGSP | | | |
| | GSSPSASTGTGPGSSPSASTGTGPGSST | | | |
| | PSGATGSPGSSTPSGATGSPGASPGTS | | | |
| | STGSPGASPGTSSTGSPGASPGTSSTGS | | | |
| | PGTPGSGTASSSP | | | |
| AF504 | GASPGTSSTGSPGSSPSASTGTGPGSSP | 504 | Residue totals: H: 0 E: 0 | 94.44% |
| | SASTGTGPGTPGSGTASSSPGSSTPSG | | percent: H: 0.0 E: 0.0 | |
| | ATGSPGSNPSASTGTGPGASPGTSSTG | | | |
| | SPGTPGSGTASSSPGSSTPSGATGSPGT | | | |
| | PGSGTASSSPGASPGTSSTGSPGASPG | | | |
| | TSSTGSPGTPGSGTASSSPGSSTPSGAT | | | |
| | GSPGASPGTSSTGSPGTPGSGTASSSP | | | |
| | GSSTPSGATGSPGSNPSASTGTGPGSS | | | |
| | PSASTGTGPGSSTPSGATGSPGSSTPSG | | | |
| | ATGSPGASPGTSSTGSPGASPGTSSTG | | | |
| | SPGASPGTSSTGSPGTPGSGTASSSPG | | | |
| | ASPGTSSTGSPGASPGTSSTGSPGASP | | | |
| | GTSSTGSPGSSPSASTGTGPGTPGSGT | | | |
| | ASSSPGASPGTSSTGSPGASPGTSSTGS | | | |
| | PGASPGTSSTGSPGSSTPSGATGSPGSS | | | |
| | TPSGATGSPGASPGTSSTGSPGTPGSG | | | |
| | TASSSPGSSTPSGATGSPGSSTPSGATG | | | |
| | SPGSSTPSGATGSPGSSPSASTGTGPG | | | |
| | ASPGTSSTGSP | | | |
| AD 576 | GSSESGSSEGGPGSGGEPSESGSSGSSE | 576 | Residue totals: H: 7 E: 0 | 99.65% |
| | SGSSEGGPGSSESGSSEGGPGSSESGSS | | percent: H: 1.2 E: 0.0 | |
| | EGGPGSSESGSSEGGPGSSESGSSEGG | | | |
| | PGESPGGSSGSESGSEGSSGPGESSGSS | | | |
| | ESGSSEGGPGSSESGSSEGGPGSSESGS | | | |
| | SEGGPGSGGEPSESGSSGESPGGSSGS | | | |
| | ESGESPGGSSGSESGSGGEPSESGSSGS | | | |
| | SESGSSEGGPGSGGEPSESGSSGSGGE | | | |
| | PSESGSSGSEGSSGPGESSGESPGGSSG | | | |
| | SESGSGGEPSESGSSGSGGEPSESGSSG | | | |
| | SGGEPSESGSSGSSESGSSEGGPGESPG | | | |
| | GSSGSESGESPGGSSGSESGESPGGSS | | | |
| | GSESGESPGGSSGSESGESPGGSSGSES | | | |
| | GSSESGSSEGGPGSGGEPSESGSSGSE | | | |
| | GSSGPGESSGSSESGSSEGGPGSGGEP | | | |
| | SESGSSGSSESGSSEGGPGSGGEPSESG | | | |
| | SSGESPGGSSGSESGESPGGSSGSESGS | | | |
| | SESGSSEGGPGSGGEPSESGSSGSSESG | | | |
| | SSEGGPGSGGEPSESGSSGSGGEPSES | | | |
| | GSSGESPGGSSGSESGSEGSSGPGESS | | | |
| | GSSESGSSEGGPGSEGSSGPGESS | | | |
| AE576 | GSPAGSPTSTEEGTSESATPESGPGTST | 576 | Residue totals: H: 2 E: 0 | 99.65% |
| | EPSEGSAPGSPAGSPTSTEEGTSTEPSE | | percent: H: 0.4 E: 0.0 | |
| | GSAPGTSTEPSEGSAPGTSESATPESGP | | | |
| | GSEPATSGSETPGSEPATSGSETPGSPA | | | |
| | GSPTSTEEGTSESATPESGPGTSTEPSE | | | |
| | GSAPGTSTEPSEGSAPGSPAGSPTSTEE | | | |
| | GTSTEPSEGSAPGTSTEPSEGSAPGTSE | | | |
| | SATPESGPGTSTEPSEGSAPGTSESATP | | | |
| | ESGPGSEPATSGSETPGTSTEPSEGSAP | | | |
| | GTSTEPSEGSAPGTSESATPESGPGTSE | | | |
| | SATPESGPGSPAGSPTSTEEGTSESATP | | | |
| | ESGPGSEPATSGSETPGTSESATPESGP | | | |
| | GTSTEPSEGSAPGTSTEPSEGSAPGTST | | | |
| | EPSEGSAPGTSTEPSEGSAPGTSTEPSE | | | |
| | GSAPGTSTEPSEGSAPGSPAGSPTSTEE | | | |
| | GTSTEPSEGSAPGTSESATPESGPGSEP | | | |
| | ATSGSETPGTSESATPESGPGSEPATS | | | |
| | GSETPGTSESATPESGPGTSTEPSEGSA | | | |
| | PGTSESATPESGPGSPAGSPTSTEEGSP | | | |
| | AGSPTSTEEGSPAGSPTSTEEGTSESAT | | | |
| | PESGPGTSTEPSEGSAP | | | |
| AG576 | PGTPGSGTASSSPGSSTPSGATGSPGSS | 576 | Residue totals: H: 0 E: 3 | 99.31% |
| | PSASTGTGPGSSPSASTGTGPGSSTPSG | | percent: H: 0.4 E: 0.5 | |
| | ATGSPGSSTPSGATGSPGASPGTSSTG | | | |
| | SPGASPGTSSTGSPGASPGTSSTGSPGT | | | |
| | PGSGTASSSPGASPGTSSTGSPGASPG | | | |
| | TSSTGSPGASPGTSSTGSPGSSPSASTG | | | |
| | TGPGTPGSGTASSSPGASPGTSSTGSP | | | |
| | GASPGTSSTGSPGASPGTSSTGSPGSST | | | |
| | PSGATGSPGSSTPSGATGSPGASPGTS | | | |
| | STGSPGTPGSGTASSSPGSSTPSGATGS | | | |
| | PGSSTPSGATGSPGSSTPSGATGSPGSS | | | |
| | PSASTGTGPGASPGTSSTGSPGASPGT | | | |
| | SSTGSPGTPGSGTASSSPGASPGTSSTG | | | |
| | SPGASPGTSSTGSPGASPGTSSTGSPG | | | |
| | ASPGTSSTGSPGTPGSGTASSSPGSSTP | | | |
| | SGATGSPGTPGSGTASSSPGSSTPSGA | | | |
| | TGSPGTPGSGTASSSPGSSTPSGATGSP | | | |
| | GSSTPSGATGSPGSSPSASTGTGPGSSP | | | |
| | SASTGTGPGASPGTSSTGSPGTPGSGT | | | |
| | ASSSPGSSTPSGATGSPGSSPSASTGTG | | | |
| | PGSSPSASTGTGPGASPGTSSTGS | | | |
| AF540 | GSTSSTAESPGPGSTSSTAESPGPGSTS | 540 | Residue totals: H: 2 E: 0 | 99.65 |
| | ESPSGTAPGSTSSTAESPGPGSTSSTAE | | percent: H: 0.4 E: 0.0 | |
| | SPGPGTSTPESGSASPGSTSESPSGTAP | | | |
| | GTSPSGESSTAPGSTSESPSGTAPGSTS | | | |
| | ESPSGTAPGTSPSGESSTAPGSTSESPS | | | |
| | GTAPGSTSESPSGTAPGTSPSGESSTAP | | | |
| | GSTSESPSGTAPGSTSESPSGTAPGSTS | | | |
| | ESPSGTAPGTSTPESGSASPGSTSESPS | | | |
| | GTAPGTSTPESGSASPGSTSSTAESPGP | | | |
| | GSTSSTAESPGPGTSTPESGSASPGTST | | | |
| | PESGSASPGSTSESPSGTAPGTSTPESG | | | |
| | SASPGTSTPESGSASPGSTSESPSGTAP | | | |
| | GSTSESPSGTAPGSTSESPSGTAPGSTS | | | |
| | STAESPGPGTSTPESGSASPGTSTPESG | | | |
| | SASPGSTSESPSGTAPGSTSESPSGTAP | | | |
| | GTSTPESGSASPGSTSESPSGTAPGSTS | | | |
| | ESPSGTAPGTSTPESGSASPGTSPSGES | | | |
| | STAPGSTSSTAESPGPGTSPSGESSTAP | | | |
| | GSTSSTAESPGPGTSTPESGSASPGSTS | | | |
| | ESPSGTAP | | | |
| AD836 | GSSESGSSEGGPGSSESGSSEGGPGESP | 836 | Residue totals: H: 0 E: 0 | 98.44% |
| | GGSSGSESGSGGEPSESGSSGESPGGS | | percent: H: 0.0 E: 0.0 | |
| | SGSESGESPGGSSGSESGSSESGSSEGG | | | |
| | PGSSESGSSEGGPGSSESGSSEGGPGES | | | |
| | PGGSSGSESGESPGGSSGSESGESPGG | | | |
| | SSGSESGSSESGSSEGGPGSSESGSSEG | | | |
| | GPGSSESGSSEGGPGSSESGSSEGGPG | | | |
| | SSESGSSEGGPGSSESGSSEGGPGSGG | | | |
| | EPSESGSSGESPGGSSGSESGESPGGSS | | | |
| | GSESGSGGEPSESGSSGSEGSSGPGESS | | | |
| | GSSESGSSEGGPGSGGEPSESGSSGSE | | | |
| | GSSGPGESSGSSESGSSEGGPGSGGEP | | | |
| | SESGSSGESPGGSSGSESGSGGEPSESG | | | |
| | SSGSGGEPSESGSSGSSESGSSEGGPGS | | | |
| | GGEPSESGSSGSGGEPSESGSSGSEGSS | | | |
| | GPGESSGESPGGSSGSESGSEGSSGPG | | | |
| | ESSGSEGSSGPGESSGSGGEPSESGSSG | | | |
| | SSESGSSEGGPGSSESGSSEGGPGESPG | | | |
| | GSSGSESGSGGEPSESGSSGSEGSSGP | | | |
| | GESSGESPGGSSGSESGSEGSSGPGSSE | | | |
| | SGSSEGGPGSGGEPSESGSSGSEGSSG | | | |
| | PGESSGSEGSSGPGESSGSEGSSGPGES | | | |
| | SGSGGEPSESGSSGSGGEPSESGSSGES | | | |
| | PGGSSGSESGESPGGSSGSESGSGGEP | | | |
| | SESGSSGSEGSSGPGESSGESPGGSSGS | | | |
| | ESGSSESGSSEGGPGSSESGSSEGGPGS | | | |
| | SESGSSEGGPGSGGEPSESGSSGSSESG | | | |
| | SSEGGPGESPGGSSGSESGSGGEPSES | | | |
| | GSSGSSESGSSEGGPGESPGGSSGSES | | | |
| | GSGGEPSESGSSGESPGGSSGSESGSG | | | |
| | GEPSESGSS | | | |
| AE864 | GSPAGSPTSTEEGTSESATPESGPGTST | 864 | Residue totals: H: 2 E: 3 | 99.77% |
| | EPSEGSAPGSPAGSPTSTEEGTSTEPSE | | percent: H: 0.2 E: 0.4 | |
| | GSAPGTSTEPSEGSAPGTSESATPESGP | | | |
| | GSEPATSGSETPGSEPATSGSETPGSPA | | | |
| | GSPTSTEEGTSESATPESGPGTSTEPSE | | | |
| | GSAPGTSTEPSEGSAPGSPAGSPTSTEE | | | |
| | GTSTEPSEGSAPGTSTEPSEGSAPGTSE | | | |
| | SATPESGPGTSTEPSEGSAPGTSESATP | | | |
| | ESGPGSEPATSGSETPGTSTEPSEGSAP | | | |
| | GTSTEPSEGSAPGTSESATPESGPGTSE | | | |
| | SATPESGPGSPAGSPTSTEEGTSESATP | | | |
| | ESGPGSEPATSGSETPGTSESATPESGP | | | |
| | GTSTEPSEGSAPGTSTEPSEGSAPGTST | | | |
| | EPSEGSAPGTSTEPSEGSAPGTSTEPSE | | | |
| | GSAPGTSTEPSEGSAPGSPAGSPTSTEE | | | |
| | GTSTEPSEGSAPGTSESATPESGPGSEP | | | |
| | ATSGSETPGTSESATPESGPGSEPATS | | | |
| | GSETPGTSESATPESGPGTSTEPSEGSA | | | |
| | PGTSESATPESGPGSPAGSPTSTEEGSP | | | |
| | AGSPTSTEEGSPAGSPTSTEEGTSESAT | | | |
| | PESGPGTSTEPSEGSAPGTSESATPESG | | | |
| | PGSEPATSGSETPGTSESATPESGPGSE | | | |
| | PATSGSETPGTSESATPESGPGTSTEPS | | | |
| | EGSAPGSPAGSPTSTEEGTSESATPES | | | |
| | GPGSEPATSGSETPGTSESATPESGPGS | | | |
| | PAGSPTSTEEGSPAGSPTSTEEGTSTEP | | | |
| | SEGSAPGTSESATPESGPGTSESATPES | | | |
| | GPGTSESATPESGPGSEPATSGSETPGS | | | |
| | EPATSGSETPGSPAGSPTSTEEGTSTEP | | | |
| | SEGSAPGTSTEPSEGSAPGSEPATSGSE | | | |
| | TPGTSESATPESGPGTSTEPSEGSAP | | | |
| AF864 | GSTSESPSGTAPGTSPSGESSTAPGSTS | 875 | Residue totals: H: 2 E: 0 | 95.20% |
| | ESPSGTAPGSTSESPSGTAPGTSTPESG | | percent: H: 0.2 E: 0.0 | |
| | SASPGTSTPESGSASPGSTSESPSGTAP | | | |
| | GSTSESPSGTAPGTSPSGESSTAPGSTS | | | |
| | ESPSGTAPGTSPSGESSTAPGTSPSGES | | | |
| | STAPGSTSSTAESPGPGTSPSGESSTAP | | | |
| | GTSPSGESSTAPGSTSSTAESPGPGTST | | | |
| | PESGSASPGTSTPESGSASPGSTSESPS | | | |
| | GTAPGSTSESPSGTAPGTSTPESGSASP | | | |
| | GSTSSTAESPGPGTSTPESGSASPGSTS | | | |
| | ESPSGTAPGTSPSGESSTAPGSTSSTAE | | | |
| | SPGPGTSPSGESSTAPGTSTPESGSASP | | | |
| | GSTSSTAESPGPGSTSSTAESPGPGSTS | | | |
| | STAESPGPGSTSSTAESPGPGTSPSGES | | | |
| | STAPGSTSESPSGTAPGSTSESPSGTAP | | | |
| | GTSTPESGPXXXGASASGAPSTXXXX | | | |
| | SESPSGTAPGSTSESPSGTAPGSTSESP | | | |
| | SGTAPGSTSESPSGTAPGSTSESPSGTA | | | |
| | PGSTSESPSGTAPGTSTPESGSASPGTS | | | |
| | PSGESSTAPGTSPSGESSTAPGSTSSTA | | | |
| | ESPGPGTSPSGESSTAPGTSTPESGSAS | | | |
| | PGSTSESPSGTAPGSTSESPSGTAPGTS | | | |
| | PSGESSTAPGSTSESPSGTAPGTSTPES | | | |
| | GSASPGTSTPESGSASPGSTSESPSGTA | | | |
| | PGTSTPESGSASPGSTSSTAESPGPGST | | | |
| | SESPSGTAPGSTSESPSGTAPGTSPSGE | | | |
| | SSTAPGSTSSTAESPGPGTSPSGESSTA | | | |
| | PGTSTPESGSASPGTSPSGESSTAPGTS | | | |
| | PSGESSTAPGTSPSGESSTAPGSTSSTA | | | |
| | ESPGPGSTSSTAESPGPGTSPSGESSTA | | | |
| | PGSSPSASTGTGPGSSTPSGATGSPGSS | | | |
| | TPSGATGSP | | | |
| AG864 | GASPGTSSTGSPGSSPSASTGTGPGSSP | 864 | Residue totals: H: 0 E: 0 | 94.91% |
| | SASTGTGPGTPGSGTASSSPGSSTPSG | | percent: H: 0.0 E: 0.0 | |
| | ATGSPGSSPSASTGTGPGASPGTSSTG | | | |
| | SPGTPGSGTASSSPGSSTPSGATGSPGT | | | |
| | PGSGTASSSPGASPGTSSTGSPGASPG | | | |
| | TSSTGSPGTPGSGTASSSPGSSTPSGAT | | | |
| | GSPGASPGTSSTGSPGTPGSGTASSSP | | | |
| | GSSTPSGATGSPGSSPSASTGTGPGSSP | | | |
| | SASTGTGPGSSTPSGATGSPGSSTPSG | | | |
| | ATGSPGASPGTSSTGSPGASPGTSSTG | | | |
| | SPGASPGTSSTGSPGTPGSGTASSSPG | | | |
| | ASPGTSSTGSPGASPGTSSTGSPGASP | | | |
| | GTSSTGSPGSSPSASTGTGPGTPGSGT | | | |
| | ASSSPGASPGTSSTGSPGASPGTSSTGS | | | |
| | PGASPGTSSTGSPGSSTPSGATGSPGSS | | | |
| | TPSGATGSPGASPGTSSTGSPGTPGSG | | | |
| | TASSSPGSSTPSGATGSPGSSTPSGATG | | | |
| | SPGSSTPSGATGSPGSSPSASTGTGPG | | | |
| | ASPGTSSTGSPGASPGTSSTGSPGTPGS | | | |
| | GTASSSPGASPGTSSTGSPGASPGTSST | | | |
| | GSPGASPGTSSTGSPGASPGTSSTGSP | | | |
| | GTPGSGTASSSPGSSTPSGATGSPGTP | | | |
| | GSGTASSSPGSSTPSGATGSPGTPGSG | | | |
| | TASSSPGSSTPSGATGSPGSSTPSGATG | | | |
| | SPGSSPSASTGTGPGSSPSASTGTGPG | | | |
| | ASPGTSSTGSPGTPGSGTASSSPGSSTP | | | |
| | SGATGSPGSSPSASTGTGPGSSPSAST | | | |
| | GTGPGASPGTSSTGSPGASPGTSSTGS | | | |
| | PGSSTPSGATGSPGSSPSASTGTGPGA | | | |
| | SPGTSSTGSPGSSPSASTGTGPGTPGSG | | | |
| | TASSSPGSSTPSGATGSPGSSTPSGATG | | | |
| | SPGASPGTSSTGSP | | | |
| AM875 | GTSTEPSEGSAPGSEPATSGSETPGSPA | 875 | Residue totals: H: 7 E: 3 | 98.63% |
| | GSPTSTEEGSTSSTAESPGPGTSTPESG | | percent: H: 0.8 E: 0.3 | |
| | SASPGSTSESPSGTAPGSTSESPSGTAP | | | |
| | GTSTPESGSASPGTSTPESGSASPGSEP | | | |
| | ATSGSETPGTSESATPESGPGSPAGSPT | | | |
| | STEEGTSTEPSEGSAPGTSESATPESGP | | | |
| | GTSTEPSEGSAPGTSTEPSEGSAPGSPA | | | |
| | GSPTSTEEGTSTEPSEGSAPGTSTEPSE | | | |
| | GSAPGTSESATPESGPGTSESATPESGP | | | |
| | GTSTEPSEGSAPGTSTEPSEGSAPGTSE | | | |
| | SATPESGPGTSTEPSEGSAPGSEPATSG | | | |
| | SETPGSPAGSPTSTEEGSSTPSGATGSP | | | |
| | GTPGSGTASSSPGSSTPSGATGSPGTS | | | |
| | TEPSEGSAPGTSTEPSEGSAPGSEPATS | | | |
| | GSETPGSPAGSPTSTEEGSPAGSPTSTE | | | |
| | EGTSTEPSEGSAPGASASGAPSTGGTS | | | |
| | ESATPESGPGSPAGSPTSTEEGSPAGSP | | | |
| | TSTEEGSTSSTAESPGPGSTSESPSGTA | | | |
| | PGTSPSGESSTAPGTPGSGTASSSPGSS | | | |
| | TPSGATGSPGSSPSASTGTGPGSEPAT | | | |
| | SGSETPGTSESATPESGPGSEPATSGSE | | | |
| | TPGSTSSTAESPGPGSTSSTAESPGPGT | | | |
| | SPSGESSTAPGSEPATSGSETPGSEPAT | | | |
| | SGSETPGTSTEPSEGSAPGSTSSTAESP | | | |
| | GPGTSTPESGSASPGSTSESPSGTAPGT | | | |
| | STEPSEGSAPGTSTEPSEGSAPGTSTEP | | | |
| | SEGSAPGSSTPSGATGSPGSSPSASTGT | | | |
| | GPGASPGTSSTGSPGSEPATSGSETPG | | | |
| | TSESATPESGPGSPAGSPTSTEEGSSTP | | | |
| | SGATGSPGSSPSASTGTGPGASPGTSS | | | |
| | TGSPGTSESATPESGPGTSTEPSEGSAP | | | |
| | GTSTEPSEGSAP | | | |
| AM1318 | GTSTEPSEGSAPGSEPATSGSETPGSPA | 1318 | Residue totals: H: 7 E: 0 | 99.17% |
| | GSPTSTEEGSTSSTAESPGPGTSTPESG | | percent: H: 0.7 E: 0.0 | |
| | SASPGSTSESPSGTAPGSTSESPSGTAP | | | |
| | GTSTPESGSASPGTSTPESGSASPGSEP | | | |
| | ATSGSETPGTSESATPESGPGSPAGSPT | | | |
| | STEEGTSTEPSEGSAPGTSESATPESGP | | | |
| | GTSTEPSEGSAPGTSTEPSEGSAPGSPA | | | |
| | GSPTSTEEGTSTEPSEGSAPGTSTEPSE | | | |
| | GSAPGTSESATPESGPGTSESATPESGP | | | |
| | GTSTEPSEGSAPGTSTEPSEGSAPGTSE | | | |
| | SATPESGPGTSTEPSEGSAPGSEPATSG | | | |
| | SETPGSPAGSPTSTEEGSSTPSGATGSP | | | |
| | GTPGSGTASSSPGSSTPSGATGSPGTS | | | |
| | TEPSEGSAPGTSTEPSEGSAPGSEPATS | | | |
| | GSETPGSPAGSPTSTEEGSPAGSPTSTE | | | |
| | EGTSTEPSEGSAPGPEPTGPAPSGGSEP | | | |
| | ATSGSETPGTSESATPESGPGSPAGSPT | | | |
| | STEEGTSESATPESGPGSPAGSPTSTEE | | | |
| | GSPAGSPTSTEEGTSESATPESGPGSPA | | | |
| | GSPTSTEEGSPAGSPTSTEEGSTSSTAE | | | |
| | SPGPGSTSESPSGTAPGTSPSGESSTAP | | | |
| | GSTSESPSGTAPGSTSESPSGTAPGTSP | | | |
| | SGESSTAPGTSTEPSEGSAPGTSESATP | | | |
| | ESGPGTSESATPESGPGSEPATSGSETP | | | |
| | GTSESATPESGPGTSESATPESGPGTST | | | |
| | EPSEGSAPGTSESATPESGPGTSTEPSE | | | |
| | GSAPGTSPSGESSTAPGTSPSGESSTAP | | | |
| | GTSPSGESSTAPGTSTEPSEGSAPGSPA | | | |
| | GSPTSTEEGTSTEPSEGSAPGSSPSAST | | | |
| | GTGPGSSTPSGATGSPGSSTPSGATGS | | | |
| | PGSSTPSGATGSPGSSTPSGATGSPGA | | | |
| | SPGTSSTGSPGASASGAPSTGGTSPSG | | | |
| | ESSTAPGSTSSTAESPGPGTSPSGESST | | | |
| | APGTSESATPESGPGTSTEPSEGSAPG | | | |
| | TSTEPSEGSAPGSSPSASTGTGPGSSTP | | | |
| | SGATGSPGASPGTSSTGSPGTSTPESG | | | |
| | SASPGTSPSGESSTAPGTSPSGESSTAP | | | |
| | GTSESATPESGPGSEPATSGSETPGTST | | | |
| | EPSEGSAPGSTSESPSGTAPGSTSESPS | | | |
| | GTAPGTSTPESGSASPGSPAGSPTSTEE | | | |
| | GTSESATPESGPGTSTEPSEGSAPGSPA | | | |
| | GSPTSTEEGTSESATPESGPGSEPATSG | | | |
| | SETPGSSTPSGATGSPGASPGTSSTGSP | | | |
| | GSSTPSGATGSPGSTSESPSGTAPGTSP | | | |
| | SGESSTAPGSTSSTAESPGPGSSTPSGA | | | |
| | TGSPGASPGTSSTGSPGTPGSGTASSSP | | | |
| | GSPAGSPTSTEEGSPAGSPTSTEEGTST | | | |
| | EPSEGSAP | | | |
| AM923 | MAEPAGSPTSTEEGASPGTSSTGSPGS | 924 | Residue totals: H: 4 E: 3 | 98.70% |
| | STPSGATGSPGSSTPSGATGSPGTSTEP | | percent: H: 0.4 E: 0.3 | |
| | SEGSAPGSEPATSGSETPGSPAGSPTST | | | |
| | EEGSTSSTAESPGPGTSTPESGSASPGS | | | |
| | TSESPSGTAPGSTSESPSGTAPGTSTPE | | | |
| | SGSASPGTSTPESGSASPGSEPATSGSE | | | |
| | TPGTSESATPESGPGSPAGSPTSTEEGT | | | |
| | STEPSEGSAPGTSESATPESGPGTSTEP | | | |
| | SEGSAPGTSTEPSEGSAPGSPAGSPTST | | | |
| | EEGTSTEPSEGSAPGTSTEPSEGSAPGT | | | |
| | SESATPESGPGTSESATPESGPGTSTEP | | | |
| | SEGSAPGTSTEPSEGSAPGTSESATPES | | | |
| | GPGTSTEPSEGSAPGSEPATSGSETPGS | | | |
| | PAGSPTSTEEGSSTPSGATGSPGTPGS | | | |
| | GTASSSPGSSTPSGATGSPGTSTEPSEG | | | |
| | SAPGTSTEPSEGSAPGSEPATSGSETPG | | | |
| | SPAGSPTSTEEGSPAGSPTSTEEGTSTE | | | |
| | PSEGSAPGASASGAPSTGGTSESATPE | | | |
| | SGPGSPAGSPTSTEEGSPAGSPTSTEEG | | | |
| | STSSTAESPGPGSTSESPSGTAPGTSPS | | | |
| | GESSTAPGTPGSGTASSSPGSSTPSGA | | | |
| | TGSPGSSPSASTGTGPGSEPATSGSETP | | | |
| | GTSESATPESGPGSEPATSGSETPGSTS | | | |
| | STAESPGPGSTSSTAESPGPGTSPSGES | | | |
| | STAPGSEPATSGSETPGSEPATSGSETP | | | |
| | GTSTEPSEGSAPGSTSSTAESPGPGTST | | | |
| | PESGSASPGSTSESPSGTAPGTSTEPSE | | | |
| | GSAPGTSTEPSEGSAPGTSTEPSEGSAP | | | |
| | GSSTPSGATGSPGSSPSASTGTGPGAS | | | |
| | PGTSSTGSPGSEPATSGSETPGTSESAT | | | |
| | PESGPGSPAGSPTSTEEGSSTPSGATGS | | | |
| | PGSSPSASTGTGPGASPGTSSTGSPGTS | | | |
| | ESATPESGPGTSTEPSEGSAPGTSTEPS | | | |
| | EGSAP | | | |
| AE912 | MAEPAGSPTSTEEGTPGSGTASSSPGS | 913 | Residue totals: H: 8 E: 3 | 99.45% |
| | STPSGATGSPGASPGTSSTGSPGSPAG | | percent: H: 0.9 E: 0.3 | |
| | SPTSTEEGTSESATPESGPGTSTEPSEG | | | |
| | SAPGSPAGSPTSTEEGTSTEPSEGSAPG | | | |
| | TSTEPSEGSAPGTSESATPESGPGSEPA | | | |
| | TSGSETPGSEPATSGSETPGSPAGSPTS | | | |
| | TEEGTSESATPESGPGTSTEPSEGSAPG | | | |
| | TSTEPSEGSAPGSPAGSPTSTEEGTSTE | | | |
| | PSEGSAPGTSTEPSEGSAPGTSESATPE | | | |
| | SGPGTSTEPSEGSAPGTSESATPESGPG | | | |
| | SEPATSGSETPGTSTEPSEGSAPGTSTE | | | |
| | PSEGSAPGTSESATPESGPGTSESATPE | | | |
| | SGPGSPAGSPTSTEEGTSESATPESGPG | | | |
| | SEPATSGSETPGTSESATPESGPGTSTE | | | |
| | PSEGSAPGTSTEPSEGSAPGTSTEPSEG | | | |
| | SAPGTSTEPSEGSAPGTSTEPSEGSAPG | | | |
| | TSTEPSEGSAPGSPAGSPTSTEEGTSTE | | | |
| | PSEGSAPGTSESATPESGPGSEPATSGS | | | |
| | ETPGTSESATPESGPGSEPATSGSETPG | | | |
| | TSESATPESGPGTSTEPSEGSAPGTSES | | | |
| | ATPESGPGSPAGSPTSTEEGSPAGSPTS | | | |
| | TEEGSPAGSPTSTEEGTSESATPESGPG | | | |
| | TSTEPSEGSAPGTSESATPESGPGSEPA | | | |
| | TSGSETPGTSESATPESGPGSEPATSGS | | | |
| | ETPGTSESATPESGPGTSTEPSEGSAPG | | | |
| | SPAGSPTSTEEGTSESATPESGPGSEPA | | | |
| | TSGSETPGTSESATPESGPGSPAGSPTS | | | |
| | TEEGSPAGSPTSTEEGTSTEPSEGSAPG | | | |
| | TSESATPESGPGTSESATPESGPGTSES | | | |
| | ATPESGPGSEPATSGSETPGSEPATSGS | | | |
| | ETPGSPAGSPTSTEEGTSTEPSEGSAPG | | | |
| | TSTEPSEGSAPGSEPATSGSETPGTSES | | | |
| | ATPESGPGTSTEPSEGSAP | | | |
| BC 864 | GTSTEPSEPGSAGTSTEPSEPGSAGSEP | | Residue totals: H: 0 E: 0 | 99.77% |
| | ATSGTEPSGSGASEPTSTEPGSEPATS | | percent: H: 0 E: 0 | |
| | GTEPSGSEPATSGTEPSGSEPATSGTEP | | | |
| | SGSGASEPTSTEPGTSTEPSEPGSAGSE | | | |
| | PATSGTEPSGTSTEPSEPGSAGSEPATS | | | |
| | GTEPSGSEPATSGTEPSGTSTEPSEPGS | | | |
| | AGTSTEPSEPGSAGSEPATSGTEPSGS | | | |
| | EPATSGTEPSGTSEPSTSEPGAGSGAS | | | |
| | EPTSTEPGTSEPSTSEPGAGSEPATSGT | | | |
| | EPSGSEPATSGTEPSGTSTEPSEPGSAG | | | |
| | TSTEPSEPGSAGSGASEPTSTEPGSEPA | | | |
| | TSGTEPSGSEPATSGTEPSGSEPATSGT | | | |
| | EPSGSEPATSGTEPSGTSTEPSEPGSAG | | | |
| | SEPATSGTEPSGSGASEPTSTEPGTSTE | | | |
| | PSEPGSAGSEPATSGTEPSGSGASEPTS | | | |
| | TEPGTSTEPSEPGSAGSGASEPTSTEPG | | | |
| | SEPATSGTEPSGSGASEPTSTEPGSEPA | | | |
| | TSGTEPSGSGASEPTSTEPGTSTEPSEP | | | |
| | GSAGSEPATSGTEPSGSGASEPTSTEP | | | |
| | GTSTEPSEPGSAGSEPATSGTEPSGTST | | | |
| | EPSEPGSAGSEPATSGTEPSGTSTEPSE | | | |
| | PGSAGTSTEPSEPGSAGTSTEPSEPGSA | | | |
| | GTSTEPSEPGSAGTSTEPSEPGSAGTST | | | |
| | EPSEPGSAGTSEPSTSEPGAGSGASEPT | | | |
| | STEPGTSTEPSEPGSAGTSTEPSEPGSA | | | |
| | GTSTEPSEPGSAGSEPATSGTEPSGSG | | | |
| | ASEPTSTEPGSEPATSGTEPSGSEPATS | | | |
| | GTEPSGSEPATSGTEPSGSEPATSGTEP | | | |
| | SGTSEPSTSEPGAGSEPATSGTEPSGSG | | | |
| | ASEPTSTEPGTSTEPSEPGSAGSEPATS | | | |
| | GTEPSGSGASEPTSTEPGTSTEPSEPGS | | | |
| | A | | | |

*H: alpha-helix E: beta-sheet

### Example 30: Analysis of Polypeptide Sequences for Repetitiveness

[0452] In this Example, different polypeptides, including several XTEN sequences, were assessed for repetitiveness in the amino acid sequence. Polypeptide amino acid sequences can be assessed for repetitiveness by quantifying the number of times a shorter subsequence appears within the overall polypeptide. For example, a polypeptide of 200 amino acid residues length has a total of 165 overlapping 36-amino acid “blocks” (or “36-mers”) and 198 3-mer “subsequences”, but the number of unique 3-mer subsequences will depend on the amount of repetitiveness within the sequence. For the analyses, different polypeptide sequences were assessed for repetitiveness by determining the subsequence score obtained by application of the following equation:

$$Subsequence score = \frac{{\sum }_{i = 1}^{m} {Count}_{i}}{m} \qquad I$$

[0453] wherein: m=(amino acid length of polypeptide)−(amino acid length of subsequence)+1; and Countᵢ=cumulative number of occurrences of each unique subsequence within sequenceᵢ
   In the analyses of the present Example, the subsequence score for the polypeptides of Table 26 were determined using the foregoing equation in a computer program using the algorithm depicted in FIG. 1, wherein the subsequence length was set at 3 amino acids. The resulting subsequence score is a reflection of the degree of repetitiveness within the polypeptide.

[0454] The results, shown in Table 26, indicate that the unstructured polypeptides consisting of 2 or 3 amino acid types have high subsequence scores, while those of consisting of the 12 amino acid motifs of the six amino acids G, S, T, E, P, and A with a low degree of internal repetitiveness, have subsequence scores of less than 10, and in some cases, less than 5. For example, the L288 sequence has two amino acid types and has short, highly repetitive sequences, resulting in a subsequence score of 50.0. The polypeptide J288 has three amino acid types but also has short, repetitive sequences, resulting in a subsequence score of 33.3. Y576 also has three amino acid types, but is not made of internal repeats, reflected in the subsequence score of 15.7 over the first 200 amino acids. W576 consists of four types of amino acids, but has a higher degree of internal repetitiveness, e.g., “GGSG” (SEQ ID NO: 716), resulting in a subsequence score of 23.4. The AD576 consists of four types of 12 amino acid motifs, each consisting of four types of amino acids. Because of the low degree of internal repetitiveness of the individual motifs, the overall subsequence score over the first 200 amino acids is 13.6. In contrast, XTEN's consisting of four motifs contains six types of amino acids, each with a low degree of internal repetitiveness have lower subsequence scores; i.e., AE864 (6.1), AF864 (7.5), and AM875 (4.5), while XTEN consisting of four motifs containing five types of amino acids were intermediate; i.e., AE864, with a score of 7.2.

[0455] Conclusions:

[0456] The results indicate that the combination of 12 amino acid subsequence motifs, each consisting of four to six amino acid types that are non-repetitive, into a longer XTEN polypeptide results in an overall sequence that is substantially non-repetitive, as indicated by overall average subsequence scores less than 10 and, in many cases, less than 5. This is despite the fact that each subsequence motif may be used multiple times across the sequence. In contrast, polymers created from smaller numbers of amino acid types resulted in higher average subsequence scores, with polypeptides consisting of two amino acid type having higher scores that those consisting of three amino acid types.

TABLE 26
Average subsequence score calculations of polypeptide sequences

| Seq | SEQ ID | | |
|---|---|---|---|
| Name | NO: | Amino Acid Sequence | Score |
| J288 | 717 | GSGGEGGSGGEGGSGGEGGSGGEGGSGGEGGSGGEGGSGGEGGSGGEG | 33.3 |
| | | GSGGEGGSGGEGGSGGEGGSGGEGGSGGEGGSGGEGGSGGEGGSGGEG | |
| | | GSGGEGGSGGEGGSGGEGGSGGEGGSGGEGGSGGEGGSGGEGGSGGEG | |
| | | GSGGEGGSGGEGGSGGEGGSGGEGGSGGEGGSGGEGGSGGEGGSGGEG | |
| | | GSGGEGGSGGEGGSGGEGGSGGEGGSGGEGGSGGEGGSGGEGGSGGEG | |
| | | GSGGEGGSGGEGGSGGEGGSGGEGGSGGEGGSGGEGGSGGEGGSGGEG | |
| K288 | 718 | GEGEGGGEGGEGEGGGEGGEGEGGGEGGEGEGGGEGGEGEGGGEGGE | 46.9 |
| | | GEGGGEGGEGEGGGEGGEGEGGGEGGEGEGGGEGGEGEGGGEGGEGE | |
| | | GGGEGGEGEGGGEGGEGEGGGEGGEGEGGGEGGEGEGGGEGGEGEGG | |
| | | GEGGEGEGGGEGGEGEGGGEGGEGEGGGEGGEGEGGGEGGEGEGGGE | |
| | | GGEGEGGGEGGEGEGGGEGGEGEGGGEGGEGEGGGEGGEGEGGGEGG | |
| | | EGEGGGEGGEGEGGGEGGEGEGGGEGGEGEGGGEGGEGEGGGEGGEG | |
| | | EGGGEG | |
| L288 | 719 | SSESSESSSSESSSESSESSSSESSSESSESSSSESSSESSESSSSESSSESSESSS | 50.0 |
| | | SESSSESSESSSSESSSESSESSSSESSSESSESSSSESSSESSESSSSESSSESSE | |
| | | SSSSESSSESSESSSSESSSESSESSSSESSSESSESSSSESSSESSESSSSESSSE | |
| | | SSESSSSESSSESSESSSSESSSESSESSSSESSSESSESSSSESSSESSESSSSES | |
| | | SSESSESSSSESSSESSESSSSESSSESSESSSSESSSESSESSSSESSSESSESSS | |
| | | SES | |
| Y288 | 720 | GEGSGEGSEGEGSEGSGEGEGSEGSGEGEGGSEGSEGEGGSEGSEGEGGS | 26.8 |
| | | EGSEGEGSGEGSEGEGGSEGSEGEGSGEGSEGEGSEGGSEGEGGSEGSEG | |
| | | EGSGEGSEGEGGEGGSEGEGSEGSGEGEGSGEGSEGEGSEGSGEGEGSGE | |
| | | GSEGEGSEGSGEGEGSEGSGEGEGGSEGSEGEGSEGSGEGEGGEGSGEGE | |
| | | GSGEGSEGEGGGEGSEGEGSGEGGEGEGSEGGSEGEGGSEGGEGEGSEG | |
| | | SGEGEGSEGGSEGEGSEGGSEGEGSEGSGEGEGSEGSGE | |
| Q576 | 721 | GGKPGEGGKPEGGGGKPGGKPEGEGEGKPGGKPEGGGKPGGGEGGKPE | 18.5 |
| | | GGKPEGEGKPGGGEGKPGGKPEGGGGKPEGEGKPGGGGGKPGGKPEGE | |
| | | GKPGGGEGGKPEGKPGEGGEGKPGGKPEGGGEGKPGGGKPGEGGKPGE | |
| | | GKPGGGEGGKPEGGKPEGEGKPGGGEGKPGGKPGEGGKPEGGGEGKPG | |
| | | GKPGEGGEGKPGGGKPEGEGKPGGGKPGGGEGGKPEGEGKPGGKPEGG | |
| | | GEGKPGGKPEGGGKPEGGGEGKPGGGKPGEGGKPGEGEGKPGGKPEGE | |
| | | GKPGGEGGGKPEGKPGGGEGGKPEGGKPGEGGKPEGGKPGEGGEGKPG | |
| | | GGKPGEGGKPEGGGKPEGEGKPGGGGKPGEGGKPEGGKPEGGGEGKPG | |
| | | GGKPEGEGKPGGGEGKPGGKPEGGGGKPGEGGKPEGGKPGGEGGGKPE | |
| | | GEGKPGGKPGEGGGGKPGGKPEGEGKPGEGGEGKPGGKPEGGGEGKPG | |
| | | GKPEGGGEGKPGGGKPGEGGKPEGGGKPGEGGKPGEGGKPEGEGKPGG | |
| | | GEGKPGGKPGEGGKPEGGGEGKPGGKPGGEGGGKPEGGKPGEGGKPEG | |
| U576 | 722 | GEGKPGGKPGSGGGKPGEGGKPGSGEGKPGGKPGSGGSGKPGGKPGEG | 18.1 |
| | | GKPEGGSGGKPGGGGKPGGKPGGEGSGKPGGKPEGGGKPEGGSGGKPG | |
| | | GKPEGGSGGKPGGKPGSGEGGKPGGGKPGGEGKPGSGKPGGEGSGKPG | |
| | | GKPEGGSGGKPGGKPEGGSGGKPGGSGKPGGKPGEGGKPEGGSGGKPG | |
| | | GSGKPGGKPEGGGSGKPGGKPGEGGKPGSGEGGKPGGGKPGGEGKPGS | |
| | | GKPGGEGSGKPGGKPGSGGEGKPGGKPEGGSGGKPGGGKPGGEGKPGS | |
| | | GGKPGEGGKPGSGGGKPGGKPGGEGEGKPGGKPGEGGKPGGEGSGKPG | |
| | | GGGKPGGKPGGEGGKPEGSGKPGGGSGKPGGKPEGGGGKPEGSGKPGG | |
| | | GGKPEGSGKPGGGKPEGGSGGKPGGSGKPGGKPGEGGGKPEGSGKPGG | |
| | | GSGKPGGKPEGGGKPEGGSGGKPGGKPEGGSGGKPGGKPGGEGSGKPG | |
| | | GKPGSGEGGKPGGKPGEGSGGKPGGKPEGGSGGKPGGSGKPGGKPEGG | |
| | | GSGKPGGKPGEGGKPGGEGSGKPGGSGKPG | |
| W576 | 723 | GGSGKPGKPGGSGSGKPGSGKPGGGSGKPGSGKPGGGSGKPGSGKPGG | 23.4 |
| | | GSGKPGSGKPGGGGKPGSGSGKPGGGKPGGSGGKPGGGSGKPGKPGSG | |
| | | GSGKPGSGKPGGGSGGKPGKPGSGGSGGKPGKPGSGGGSGKPGKPGSG | |
| | | GSGGKPGKPGSGGSGGKPGKPGSGGSGKPGSGKPGGGSGKPGSGKPGSG | |
| | | GSGKPGKPGSGGSGKPGSGKPGSGSGKPGSGKPGGGSGKPGSGKPGSGG | |
| | | SGKPGKPGSGGGKPGSGSGKPGGGKPGSGSGKPGGGKPGGSGGKPGGS | |
| | | GGKPGKPGSGGGSGKPGKPGSGGGSGKPGKPGGSGSGKPGSGKPGGGS | |
| | | GKPGSGKPGSGGSGKPGKPGSGGSGGKPGKPGSGGGKPGSGSGKPGGG | |
| | | KPGSGSGKPGGGKPGSGSGKPGGGKPGSGSGKPGGSGKPGSGKPGGGSG | |
| | | GKPGKPGSGGSGKPGSGKPGSGGSGKPGKPGGSGSGKPGSGKPGGGSGK | |
| | | PGSGKPGGGSGKPGSGKPGGGSGKPGSGKPGGGGKPGSGSGKPGGSGG | |
| | | KPGKPGSGGSGGKPGKPGSGGSGKPGSGKPGGGSGGKPGKPGSGG | |
| Y576 | 724 | GEGSGEGSEGEGSEGSGEGEGSEGSGEGEGGSEGSEGEGSEGSGEGEGGE | 15.7 |
| | | GSGEGEGSGEGSEGEGGGEGSEGEGSGEGGEGEGSEGGSEGEGGSEGGE | |
| | | GEGSEGSGEGEGSEGGSEGEGSEGGSEGEGSEGSGEGEGSEGSGEGEGSE | |
| | | GSGEGEGSEGSGEGEGSEGGSEGEGGSEGSEGEGSGEGSEGEGGSEGSEG | |
| | | EGGGEGSEGEGSGEGSEGEGGSEGSEGEGGSEGSEGEGGEGSGEGEGSE | |
| | | GSGEGEGSGEGSEGEGSEGSGEGEGSEGSGEGEGGSEGSEGEGSGEGSEG | |
| | | EGSEGSGEGEGSEGSGEGEGGSEGSEGEGGSEGSEGEGGSEGSEGEGGEG | |
| | | SGEGEGSEGSGEGEGSGEGSEGEGSEGSGEGEGSEGSGEGEGGSEGSEGE | |
| | | GSEGSGEGEGGEGSGEGEGSGEGSEGEGGGEGSEGEGSEGSGEGEGSEGS | |
| | | GEGEGSEGGSEGEGGSEGSEGEGSEGGSEGEGSEGGSEGEGSEGSGEGEG | |
| | | SEGSGEGEGSGEGSEGEGGSEGGEGEGSEGGSEGEGSEGGSEGEGGEGSG | |
| | | EGEGGGEGSEGEGSEGSGEGEGSGEGSE | |
| AE288 | 725 | GTSESATPESGPGSEPATSGSETPGTSESATPESGPGSEPATSGSETPGTSES | 6.0 |
| | | ATPESGPGTSTEPSEGSAPGSPAGSPTSTEEGTSESATPESGPGSEPATSGS | |
| | | ETPGTSESATPESGPGSPAGSPTSTEEGSPAGSPTSTEEGTSTEPSEGSAPG | |
| | | TSESATPESGPGTSESATPESGPGTSESATPESGPGSEPATSGSETPGSEPAT | |
| | | SGSETPGSPAGSPTSTEEGTSTEPSEGSAPGTSTEPSEGSAPGSEPATSGSET | |
| | | PGTSESATPESGPGTSTEPSEGSAP | |
| AG288_1 | 726 | PGASPGTSSTGSPGASPGTSSTGSPGTPGSGTASSSPGSSTPSGATGSPGTP | 6.9 |
| | | GSGTASSSPGSSTPSGATGSPGTPGSGTASSSPGSSTPSGATGSPGSSTPSG | |
| | | ATGSPGSSPSASTGTGPGSSPSASTGTGPGASPGTSSTGSPGTPGSGTASSS | |
| | | PGSSTPSGATGSPGSSPSASTGTGPGSSPSASTGTGPGASPGTSSTGSPGAS | |
| | | PGTSSTGSPGSSTPSGATGSPGSSPSASTGTGPGASPGTSSTGSPGSSPSAST | |
| | | GTGPGTPGSGTASSSPGSSTPSGATGS | |
| AD576 | 727 | GSSESGSSEGGPGSGGEPSESGSSGSSESGSSEGGPGSSESGSSEGGPGSSE | 13.6 |
| | | SGSSEGGPGSSESGSSEGGPGSSESGSSEGGPGESPGGSSGSESGSEGSSGP | |
| | | GESSGSSESGSSEGGPGSSESGSSEGGPGSSESGSSEGGPGSGGEPSESGSS | |
| | | GESPGGSSGSESGESPGGSSGSESGSGGEPSESGSSGSSESGSSEGGPGSGG | |
| | | EPSESGSSGSGGEPSESGSSGSEGSSGPGESSGESPGGSSGSESGSGGEPSE | |
| | | SGSSGSGGEPSESGSSGSGGEPSESGSSGSSESGSSEGGPGESPGGSSGSES | |
| | | GESPGGSSGSESGESPGGSSGSESGESPGGSSGSESGESPGGSSGSESGSSE | |
| | | SGSSEGGPGSGGEPSESGSSGSEGSSGPGESSGSSESGSSEGGPGSGGEPSE | |
| | | SGSSGSSESGSSEGGPGSGGEPSESGSSGESPGGSSGSESGESPGGSSGSES | |
| | | GSSESGSSEGGPGSGGEPSESGSSGSSESGSSEGGPGSGGEPSESGSSGSGG | |
| | | EPSESGSSGESPGGSSGSESGSEGSSGPGESSGSSESGSSEGGPGSEGSSGP | |
| | | GESS | |
| AE576 | 728 | AGSPAGSPTSTEEGTSESATPESGPGTSTEPSEGSAPGSPAGSPTSTEEGTS | 6.1 |
| | | TEPSEGSAPGTSTEPSEGSAPGTSESATPESGPGSEPATSGSETPGSEPATS | |
| | | GSETPGSPAGSPTSTEEGTSESATPESGPGTSTEPSEGSAPGTSTEPSEGSAP | |
| | | GSPAGSPTSTEEGTSTEPSEGSAPGTSTEPSEGSAPGTSESATPESGPGTST | |
| | | EPSEGSAPGTSESATPESGPGSEPATSGSETPGTSTEPSEGSAPGTSTEPSEG | |
| | | SAPGTSESATPESGPGTSESATPESGPGSPAGSPTSTEEGTSESATPESGPG | |
| | | SEPATSGSETPGTSESATPESGPGTSTEPSEGSAPGTSTEPSEGSAPGTSTEP | |
| | | SEGSAPGTSTEPSEGSAPGTSTEPSEGSAPGTSTEPSEGSAPGSPAGSPTST | |
| | | EEGTSTEPSEGSAPGTSESATPESGPGSEPATSGSETPGTSESATPESGPGS | |
| | | EPATSGSETPGTSESATPESGPGTSTEPSEGSAPGTSESATPESGPGSPAGS | |
| | | PTSTEEGSPAGSPTSTEEGSPAGSPTSTEEGTSESATPESGPGTSTEPSEGSA | |
| | | P | |
| AF540 | 729 | GSTSSTAESPGPGSTSSTAESPGPGSTSESPSGTAPGSTSSTAESPGPGSTSS | 8.8 |
| | | TAESPGPGTSTPESGSASPGSTSESPSGTAPGTSPSGESSTAPGSTSESPSGT | |
| | | APGSTSESPSGTAPGTSPSGESSTAPGSTSESPSGTAPGSTSESPSGTAPGTS | |
| | | PSGESSTAPGSTSESPSGTAPGSTSESPSGTAPGSTSESPSGTAPGTSTPESG | |
| | | SASPGSTSESPSGTAPGTSTPESGSASPGSTSSTAESPGPGSTSSTAESPGPG | |
| | | TSTPESGSASPGTSTPESGSASPGSTSESPSGTAPGTSTPESGSASPGTSTPE | |
| | | SGSASPGSTSESPSGTAPGSTSESPSGTAPGSTSESPSGTAPGSTSSTAESPG | |
| | | PGTSTPESGSASPGTSTPESGSASPGSTSESPSGTAPGSTSESPSGTAPGTST | |
| | | PESGSASPGSTSESPSGTAPGSTSESPSGTAPGTSTPESGSASPGTSPSGESS | |
| | | TAPGSTSSTAESPGPGTSPSGESSTAPGSTSSTAESPGPGTSTPESGSASPGS | |
| | | TSESPSGTAP | |
| AF504 | 730 | GASPGTSSTGSPGSSPSASTGTGPGSSPSASTGTGPGTPGSGTASSSPGSST | 7.0 |
| | | PSGATGSPGSNPSASTGTGPGASPGTSSTGSPGTPGSGTASSSPGSSTPSGA | |
| | | TGSPGTPGSGTASSSPGASPGTSSTGSPGASPGTSSTGSPGTPGSGTASSSP | |
| | | GSSTPSGATGSPGASPGTSSTGSPGTPGSGTASSSPGSSTPSGATGSPGSNP | |
| | | SASTGTGPGSSPSASTGTGPGSSTPSGATGSPGSSTPSGATGSPGASPGTSS | |
| | | TGSPGASPGTSSTGSPGASPGTSSTGSPGTPGSGTASSSPGASPGTSSTGSP | |
| | | GASPGTSSTGSPGASPGTSSTGSPGSSPSASTGTGPGTPGSGTASSSPGASP | |
| | | GTSSTGSPGASPGTSSTGSPGASPGTSSTGSPGSSTPSGATGSPGSSTPSGA | |
| | | TGSPGASPGTSSTGSPGTPGSGTASSSPGSSTPSGATGSPGSSTPSGATGSP | |
| | | GSSTPSGATGSPGSSPSASTGTGPGASPGTSSTGSP | |
| AE864 | 731 | GSPAGSPTSTEEGTSESATPESGPGTSTEPSEGSAPGSPAGSPTSTEEGTST | 6.1 |
| | | EPSEGSAPGTSTEPSEGSAPGTSESATPESGPGSEPATSGSETPGSEPATSG | |
| | | SETPGSPAGSPTSTEEGTSESATPESGPGTSTEPSEGSAPGTSTEPSEGSAPG | |
| | | SPAGSPTSTEEGTSTEPSEGSAPGTSTEPSEGSAPGTSESATPESGPGTSTEP | |
| | | SEGSAPGTSESATPESGPGSEPATSGSETPGTSTEPSEGSAPGTSTEPSEGS | |
| | | APGTSESATPESGPGTSESATPESGPGSPAGSPTSTEEGTSESATPESGPGS | |
| | | EPATSGSETPGTSESATPESGPGTSTEPSEGSAPGTSTEPSEGSAPGTSTEPS | |
| | | EGSAPGTSTEPSEGSAPGTSTEPSEGSAPGTSTEPSEGSAPGSPAGSPTSTE | |
| | | EGTSTEPSEGSAPGTSESATPESGPGSEPATSGSETPGTSESATPESGPGSEP | |
| | | ATSGSETPGTSESATPESGPGTSTEPSEGSAPGTSESATPESGPGSPAGSPT | |
| | | STEEGSPAGSPTSTEEGSPAGSPTSTEEGTSESATPESGPGTSTEPSEGSAP | |
| | | GTSESATPESGPGSEPATSGSETPGTSESATPESGPGSEPATSGSETPGTSES | |
| | | ATPESGPGTSTEPSEGSAPGSPAGSPTSTEEGTSESATPESGPGSEPATSGS | |
| | | ETPGTSESATPESGPGSPAGSPTSTEEGSPAGSPTSTEEGTSTEPSEGSAPG | |
| | | TSESATPESGPGTSESATPESGPGTSESATPESGPGSEPATSGSETPGSEPAT | |
| | | SGSETPGSPAGSPTSTEEGTSTEPSEGSAP | |
| AF864 | 732 | GSTSESPSGTAPGTSPSGESSTAPGSTSESPSGTAPGSTSESPSGTAPGTSTP | 7.5 |
| | | ESGSASPGTSTPESGSASPGSTSESPSGTAPGSTSESPSGTAPGTSPSGESST | |
| | | APGSTSESPSGTAPGTSPSGESSTAPGTSPSGESSTAPGSTSSTAESPGPGTS | |
| | | PSGESSTAPGTSPSGESSTAPGSTSSTAESPGPGTSTPESGSASPGTSTPESG | |
| | | SASPGSTSESPSGTAPGSTSESPSGTAPGTSTPESGSASPGSTSSTAESPGPG | |
| | | TSTPESGSASPGSTSESPSGTAPGTSPSGESSTAPGSTSSTAESPGPGTSPSG | |
| | | ESSTAPGTSTPESGSASPGSTSSTAESPGPGSTSSTAESPGPGSTSSTAESPG | |
| | | PGSTSSTAESPGPGTSPSGESSTAPGSTSESPSGTAPGSTSESPSGTAPGTST | |
| | | PESGPXXXGASASGAPSTXXXXSESPSGTAPGSTSESPSGTAPGSTSESPS | |
| | | GTAPGSTSESPSGTAPGSTSESPSGTAPGSTSESPSGTAPGTSTPESGSASP | |
| | | GTSPSGESSTAPGTSPSGESSTAPGSTSSTAESPGPGTSPSGESSTAPGTSTP | |
| | | ESGSASPGSTSESPSGTAPGSTSESPSGTAPGTSPSGESSTAPGSTSESPSGT | |
| | | APGTSTPESGSASPGTSTPESGSASPGSTSESPSGTAPGTSTPESGSASPGST | |
| | | SSTAESPGPGSTSESPSGTAPGSTSESPSGTAPGTSPSGESSTAPGSTSSTAE | |
| | | SPGPGTSPSGESSTAPGTSTPESGSASPGTSPSGESSTAPGTSPSGESSTAPG | |
| | | TSPSGESSTAPGSTSSTAESPGPGSTSSTAESPGPGTSPSGESSTAPGSSPSA | |
| | | STGTGPGSSTPSGATGSPGSSTPSGATGSP | |
| AG864 | 733 | GASPGTSSTGSPGSSPSASTGTGPGSSPSASTGTGPGTPGSGTASSSPGSST | 7.2 |
| | | PSGATGSPGSSPSASTGTGPGASPGTSSTGSPGTPGSGTASSSPGSSTPSGA | |
| | | TGSPGTPGSGTASSSPGASPGTSSTGSPGASPGTSSTGSPGTPGSGTASSSP | |
| | | GSSTPSGATGSPGASPGTSSTGSPGTPGSGTASSSPGSSTPSGATGSPGSSP | |
| | | SASTGTGPGSSPSASTGTGPGSSTPSGATGSPGSSTPSGATGSPGASPGTSS | |
| | | TGSPGASPGTSSTGSPGASPGTSSTGSPGTPGSGTASSSPGASPGTSSTGSP | |
| | | GASPGTSSTGSPGASPGTSSTGSPGSSPSASTGTGPGTPGSGTASSSPGASP | |
| | | GTSSTGSPGASPGTSSTGSPGASPGTSSTGSPGSSTPSGATGSPGSSTPSGA | |
| | | TGSPGASPGTSSTGSPGTPGSGTASSSPGSSTPSGATGSPGSSTPSGATGSP | |
| | | GSSTPSGATGSPGSSPSASTGTGPGASPGTSSTGSPGASPGTSSTGSPGTPG | |
| | | SGTASSSPGASPGTSSTGSPGASPGTSSTGSPGASPGTSSTGSPGASPGTSS | |
| | | TGSPGTPGSGTASSSPGSSTPSGATGSPGTPGSGTASSSPGSSTPSGATGSP | |
| | | GTPGSGTASSSPGSSTPSGATGSPGSSTPSGATGSPGSSPSASTGTGPGSSP | |
| | | SASTGTGPGASPGTSSTGSPGTPGSGTASSSPGSSTPSGATGSPGSSPSAST | |
| | | GTGPGSSPSASTGTGPGASPGTSSTGSPGASPGTSSTGSPGSSTPSGATGSP | |
| | | GSSPSASTGTGPGASPGTSSTGSPGSSPSASTGTGPGTPGSGTASSSPGSST | |
| | | PSGATGSPGSSTPSGATGSPGASPGTSSTGSP | |
| AG-868 | 734 | GGSPGASPGTSSTGSPGSSPSASTGTGPGSSPSASTGTGPGTPGSGTASSSP | 7.5 |
| | | GSSTPSGATGSPGSNPSASTGTGPGASPGTSSTGSPGTPGSGTASSSPGSST | |
| | | PSGATGSPGTPGSGTASSSPGASPGTSSTGSPGASPGTSSTGSPGTPGSGTA | |
| | | SSSPGSSTPSGATGSPGASPGTSSTGSPGTPGSGTASSSPGSSTPSGATGSP | |
| | | GSNPSASTGTGPGSSPSASTGTGPGSSTPSGATGSPGSSTPSGATGSPGASP | |
| | | GTSSTGSPGASPGTSSTGSPGASPGTSSTGSPGTPGSGTASSSPGASPGTSS | |
| | | TGSPGASPGTSSTGSPGASPGTSSTGSPGSSPSASTGTGPGTPGSGTASSSP | |
| | | GASPGTSSTGSPGASPGTSSTGSPGASPGTSSTGSPGSSTPSGATGSPGSST | |
| | | PSGATGSPGASPGTSSTGSPGTPGSGTASSSPGSSTPSGATGSPGSSTPSGA | |
| | | TGSPGSSTPSGATGSPGSSPSASTGTGPGASPGTSSTGSPGASPGTSSTGSP | |
| | | GTPGSGTASSSPGASPGTSSTGSPGASPGTSSTGSPGASPGTSSTGSPGASP | |
| | | GTSSTGSPGTPGSGTASSSPGSSTPSGATGSPGTPGSGTASSSPGSSTPSGA | |
| | | TGSPGTPGSGTASSSPGSSTPSGATGSPGSSTPSGATGSPGSSPSASTGTGP | |
| | | GSSPSASTGTGPGASPGTSSTGSPGTPGSGTASSSPGSSTPSGATGSPGSSP | |
| | | SASTGTGPGSSPSASTGTGPGASPGTSSTGSPGASPGTSSTGSPGSSTPSGA | |
| | | TGSPGSSPSASTGTGPGASPGTSSTGSPGSSPSASTGTGPGTPGSGTASSSP | |
| | | GSSTPSGATGSPGSSTPSGATGSPGASPGTSSTGSP | |
| AM875 | 735 | GTSTEPSEGSAPGSEPATSGSETPGSPAGSPTSTEEGSTSSTAESPGPGTSTP | 4.5 |
| | | ESGSASPGSTSESPSGTAPGSTSESPSGTAPGTSTPESGSASPGTSTPESGSA | |
| | | SPGSEPATSGSETPGTSESATPESGPGSPAGSPTSTEEGTSTEPSEGSAPGTS | |
| | | ESATPESGPGTSTEPSEGSAPGTSTEPSEGSAPGSPAGSPTSTEEGTSTEPSE | |
| | | GSAPGTSTEPSEGSAPGTSESATPESGPGTSESATPESGPGTSTEPSEGSAP | |
| | | GTSTEPSEGSAPGTSESATPESGPGTSTEPSEGSAPGSEPATSGSETPGSPA | |
| | | GSPTSTEEGSSTPSGATGSPGTPGSGTASSSPGSSTPSGATGSPGTSTEPSE | |
| | | GSAPGTSTEPSEGSAPGSEPATSGSETPGSPAGSPTSTEEGSPAGSPTSTEE | |
| | | GTSTEPSEGSAPGASASGAPSTGGTSESATPESGPGSPAGSPTSTEEGSPAG | |
| | | SPTSTEEGSTSSTAESPGPGSTSESPSGTAPGTSPSGESSTAPGTPGSGTASS | |
| | | SPGSSTPSGATGSPGSSPSASTGTGPGSEPATSGSETPGTSESATPESGPGS | |
| | | EPATSGSETPGSTSSTAESPGPGSTSSTAESPGPGTSPSGESSTAPGSEPATS | |
| | | GSETPGSEPATSGSETPGTSTEPSEGSAPGSTSSTAESPGPGTSTPESGSASP | |
| | | GSTSESPSGTAPGTSTEPSEGSAPGTSTEPSEGSAPGTSTEPSEGSAPGSSTP | |
| | | SGATGSPGSSPSASTGTGPGASPGTSSTGSPGSEPATSGSETPGTSESATPE | |
| | | SGPGSPAGSPTSTEEGSSTPSGATGSPGSSPSASTGTGPGASPGTSSTGSPG | |
| | | TSESATPESGPGTSTEPSEGSAPGTSTEPSEGSAP | |
| AE912 | 736 | MAEPAGSPTSTEEGTPGSGTASSSPGSSTPSGATGSPGASPGTSSTGSPGSP | 4.5 |
| | | AGSPTSTEEGTSESATPESGPGTSTEPSEGSAPGSPAGSPTSTEEGTSTEPSE | |
| | | GSAPGTSTEPSEGSAPGTSESATPESGPGSEPATSGSETPGSEPATSGSETP | |
| | | GSPAGSPTSTEEGTSESATPESGPGTSTEPSEGSAPGTSTEPSEGSAPGSPA | |
| | | GSPTSTEEGTSTEPSEGSAPGTSTEPSEGSAPGTSESATPESGPGTSTEPSEG | |
| | | SAPGTSESATPESGPGSEPATSGSETPGTSTEPSEGSAPGTSTEPSEGSAPG | |
| | | TSESATPESGPGTSESATPESGPGSPAGSPTSTEEGTSESATPESGPGSEPAT | |
| | | SGSETPGTSESATPESGPGTSTEPSEGSAPGTSTEPSEGSAPGTSTEPSEGSA | |
| | | PGTSTEPSEGSAPGTSTEPSEGSAPGTSTEPSEGSAPGSPAGSPTSTEEGTST | |
| | | EPSEGSAPGTSESATPESGPGSEPATSGSETPGTSESATPESGPGSEPATSG | |
| | | SETPGTSESATPESGPGTSTEPSEGSAPGTSESATPESGPGSPAGSPTSTEEG | |
| | | SPAGSPTSTEEGSPAGSPTSTEEGTSESATPESGPGTSTEPSEGSAPGTSESA | |
| | | TPESGPGSEPATSGSETPGTSESATPESGPGSEPATSGSETPGTSESATPESG | |
| | | PGTSTEPSEGSAPGSPAGSPTSTEEGTSESATPESGPGSEPATSGSETPGTSE | |
| | | SATPESGPGSPAGSPTSTEEGSPAGSPTSTEEGTSTEPSEGSAPGTSESATPE | |
| | | SGPGTSESATPESGPGTSESATPESGPGSEPATSGSETPGSEPATSGSETPG | |
| | | SPAGSPTSTEEGTSTEPSEGSAPGTSTEPSEGSAPGSEPATSGSETPGTSESA | |
| | | TPESGPGTSTEPSEGSAP | |
| AM923 | 737 | MAEPAGSPTSTEEGASPGTSSTGSPGSSTPSGATGSPGSSTPSGATGSPGTS | 4.5 |
| | | TEPSEGSAPGSEPATSGSETPGSPAGSPTSTEEGSTSSTAESPGPGTSTPESG | |
| | | SASPGSTSESPSGTAPGSTSESPSGTAPGTSTPESGSASPGTSTPESGSASPG | |
| | | SEPATSGSETPGTSESATPESGPGSPAGSPTSTEEGTSTEPSEGSAPGTSESA | |
| | | TPESGPGTSTEPSEGSAPGTSTEPSEGSAPGSPAGSPTSTEEGTSTEPSEGSA | |
| | | PGTSTEPSEGSAPGTSESATPESGPGTSESATPESGPGTSTEPSEGSAPGTST | |
| | | EPSEGSAPGTSESATPESGPGTSTEPSEGSAPGSEPATSGSETPGSPAGSPTS | |
| | | TEEGSSTPSGATGSPGTPGSGTASSSPGSSTPSGATGSPGTSTEPSEGSAPG | |
| | | TSTEPSEGSAPGSEPATSGSETPGSPAGSPTSTEEGSPAGSPTSTEEGTSTEP | |
| | | SEGSAPGASASGAPSTGGTSESATPESGPGSPAGSPTSTEEGSPAGSPTSTE | |
| | | EGSTSSTAESPGPGSTSESPSGTAPGTSPSGESSTAPGTPGSGTASSSPGSST | |
| | | PSGATGSPGSSPSASTGTGPGSEPATSGSETPGTSESATPESGPGSEPATSG | |
| | | SETPGSTSSTAESPGPGSTSSTAESPGPGTSPSGESSTAPGSEPATSGSETPG | |
| | | SEPATSGSETPGTSTEPSEGSAPGSTSSTAESPGPGTSTPESGSASPGSTSES | |
| | | PSGTAPGTSTEPSEGSAPGTSTEPSEGSAPGTSTEPSEGSAPGSSTPSGATG | |
| | | SPGSSPSASTGTGPGASPGTSSTGSPGSEPATSGSETPGTSESATPESGPGSP | |
| | | AGSPTSTEEGSSTPSGATGSPGSSPSASTGTGPGASPGTSSTGSPGTSESAT | |
| | | PESGPGTSTEPSEGSAPGTSTEPSEGSAP | |
| AM1296 | 738 | GTSTEPSEGSAPGSEPATSGSETPGSPAGSPTSTEEGSTSSTAESPGPGTSTP | 4.5 |
| | | ESGSASPGSTSESPSGTAPGSTSESPSGTAPGTSTPESGSASPGTSTPESGSA | |
| | | SPGSEPATSGSETPGTSESATPESGPGSPAGSPTSTEEGTSTEPSEGSAPGTS | |
| | | ESATPESGPGTSTEPSEGSAPGTSTEPSEGSAPGSPAGSPTSTEEGTSTEPSE | |
| | | GSAPGTSTEPSEGSAPGTSESATPESGPGTSESATPESGPGTSTEPSEGSAP | |
| | | GTSTEPSEGSAPGTSESATPESGPGTSTEPSEGSAPGSEPATSGSETPGSPA | |
| | | GSPTSTEEGSSTPSGATGSPGTPGSGTASSSPGSSTPSGATGSPGTSTEPSE | |
| | | GSAPGTSTEPSEGSAPGSEPATSGSETPGSPAGSPTSTEEGSPAGSPTSTEE | |
| | | GTSTEPSEGSAPGPEPTGPAPSGGSEPATSGSETPGTSESATPESGPGSPAG | |
| | | SPTSTEEGTSESATPESGPGSPAGSPTSTEEGSPAGSPTSTEEGTSESATPES | |
| | | GPGSPAGSPTSTEEGSPAGSPTSTEEGSTSSTAESPGPGSTSESPSGTAPGTS | |
| | | PSGESSTAPGSTSESPSGTAPGSTSESPSGTAPGTSPSGESSTAPGTSTEPSE | |
| | | GSAPGTSESATPESGPGTSESATPESGPGSEPATSGSETPGTSESATPESGP | |
| | | GTSESATPESGPGTSTEPSEGSAPGTSESATPESGPGTSTEPSEGSAPGTSPS | |
| | | GESSTAPGTSPSGESSTAPGTSPSGESSTAPGTSTEPSEGSAPGSPAGSPTST | |
| | | EEGTSTEPSEGSAPGSSPSASTGTGPGSSTPSGATGSPGSSTPSGATGSPGS | |
| | | STPSGATGSPGSSTPSGATGSPGASPGTSSTGSPGASASGAPSTGGTSPSGE | |
| | | SSTAPGSTSSTAESPGPGTSPSGESSTAPGTSESATPESGPGTSTEPSEGSAP | |
| | | GTSTEPSEGSAPGSSPSASTGTGPGSSTPSGATGSPGASPGTSSTGSPGTST | |
| | | PESGSASPGTSPSGESSTAPGTSPSGESSTAPGTSESATPESGPGSEPATSGS | |
| | | ETPGTSTEPSEGSAPGSTSESPSGTAPGSTSESPSGTAPGTSTPESGSASPGS | |
| | | PAGSPTSTEEGTSESATPESGPGTSTEPSEGSAPGSPAGSPTSTEEGTSESA | |
| | | TPESGPGSEPATSGSETPGSSTPSGATGSPGASPGTSSTGSPGSSTPSGATG | |
| | | SPGSTSESPSGTAPGTSPSGESSTAPGSTSSTAESPGPGSSTPSGATGSPGAS | |
| | | PGTSSTGSPGTPGSGTASSSPGSPAGSPTSTEEGSPAGSPTSTEEGTSTEPSE | |
| | | GSAP | |

### Example 31: Calculation of TEPITOPE Scores

[0457] TEPITOPE scores of 9mer peptide sequence can be calculated by adding pocket potentials as described by Sturniolo [Sturniolo, T., et al. (1999) Nat Biotechnol, 17: 555]. In the present Example, separate Tepitope scores were calculated for individual HLA alleles. Table 27 shows as an example the pocket potentials for HLA*0101B, which occurs in high frequency in the Caucasian population. To calculate the TEPITOPE score of a peptide with sequence P1-P2-P3-P4-P5-P6-P7-P8-P9, the corresponding individual pocket potentials in Table 27 were added. The HLA*0101B score of a 9mer peptide with the sequence FDKLPRTSG (SEQ ID NO: 739) is the sum of 0, −1.3, 0, 0.9, 0, −1.8, 0.09, 0, 0.

[0458] To evaluate the TEPITOPE scores for long peptides one can repeat the process for all 9mer subsequences of the sequences. This process can be repeated for the proteins encoded by other HLA alleles. Tables 28-31 give pocket potentials for the protein products of HLA alleles that occur with high frequency in the Caucasian population.

[0459] TEPITOPE scores calculated by this method range from approximately −10 to +10. However, 9mer peptides that lack a hydrophobic amino acid (FKLMVWY) in P1 position have calculated TEPITOPE scores in the range of −1009 to −989. This value is biologically meaningless and reflects the fact that a hydrophobic amino acid serves as an anchor residue for HLA binding and peptides lacking a hydrophobic residue in P1 are considered non binders to HLA. Because most XTEN sequences lack hydrophobic residues, all combinations of 9mer subsequences will have TEPITOPEs in the range in the range of −1009 to −989. This method confirms that XTEN polypeptides may have few or no predicted T-cell epitopes.

TABLE 27
Pocket potential for HLA*0101B allele.

| Amino Acid | P1 | P2 | P3 | P4 | P5 | P6 | P7 | P8 | P9 |
|---|---|---|---|---|---|---|---|---|---|
| A | −999 | 0 | 0 | 0 | — | 0 | 0 | — | 0 |
| C | −999 | 0 | 0 | 0 | — | 0 | 0 | — | 0 |
| D | −999 | −1.3 | −1.3 | −2.4 | — | −2.7 | −2 | — | −1.9 |
| E | −999 | 0.1 | −1.2 | −0.4 | — | −2.4 | −0.6 | — | −1.9 |
| F | 0 | 0.8 | 0.8 | 0.08 | — | −2.1 | 0.3 | — | −0.4 |
| G | −999 | 0.5 | 0.2 | −0.7 | — | −0.3 | −1.1 | — | −0.8 |
| H | −999 | 0.8 | 0.2 | −0.7 | — | −2.2 | 0.1 | — | −1.1 |
| I | −1 | 1.1 | 1.5 | 0.5 | — | −1.9 | 0.6 | — | 0.7 |
| K | −999 | 1.1 | 0 | −2.1 | — | −2 | −0.2 | — | −1.7 |
| L | −1 | 1 | 1 | 0.9 | — | −2 | 0.3 | — | 0.5 |
| M | −1 | 1.1 | 1.4 | 0.8 | — | −1.8 | 0.09 | — | 0.08 |
| N | −999 | 0.8 | 0.5 | 0.04 | — | −1.1 | 0.1 | — | −1.2 |
| P | −999 | −0.5 | 0.3 | −1.9 | — | −0.2 | 0.07 | — | −1.1 |
| Q | −999 | 1.2 | 0 | 0.1 | — | −1.8 | 0.2 | — | −1.6 |
| R | −999 | 2.2 | 0.7 | −2.1 | — | −1.8 | 0.09 | — | −1 |
| S | −999 | −0.3 | 0.2 | −0.7 | — | −0.6 | −0.2 | — | −0.3 |
| T | −999 | 0 | 0 | −1 | — | −1.2 | 0.09 | — | −0.2 |
| V | −1 | 2.1 | 0.5 | −0.1 | — | −1.1 | 0.7 | — | 0.3 |
| W | 0 | −0.1 | 0 | −1.8 | — | −2.4 | −0.1 | — | −1.4 |
| Y | 0 | 0.9 | 0.8 | −1.1 | — | −2 | 0.5 | — | −0.9 |

TABLE 28
Pocket potential for HLA*0301B allele.

| Amino acid | P1 | P2 | P3 | P4 | P5 | P6 | P7 | P8 | P9 |
|---|---|---|---|---|---|---|---|---|---|
| A | −999 | 0 | 0 | 0 | — | 0 | 0 | — | 0 |
| C | −999 | 0 | 0 | 0 | — | 0 | 0 | — | 0 |
| D | −999 | −1.3 | −1.3 | 2.3 | — | −2.4 | −0.6 | — | −0.6 |
| E | −999 | 0.1 | −1.2 | −1 | — | −1.4 | −0.2 | — | −0.3 |
| F | −1 | 0.8 | 0.8 | −1 | — | −1.4 | 0.5 | — | 0.9 |
| G | −999 | 0.5 | 0.2 | 0.5 | — | −0.7 | 0.1 | — | 0.4 |
| H | −999 | 0.8 | 0.2 | 0 | — | −0.1 | −0.8 | — | −0.5 |
| I | 0 | 1.1 | 1.5 | 0.5 | — | 0.7 | 0.4 | — | 0.6 |
| K | −999 | 1.1 | 0 | −1 | — | 1.3 | −0.9 | — | −0.2 |
| L | 0 | 1 | 1 | 0 | — | 0.2 | 0.2 | — | −0 |
| M | 0 | 1.1 | 1.4 | 0 | — | −0.9 | 1.1 | — | 1.1 |
| N | −999 | 0.8 | 0.5 | 0.2 | — | −0.6 | −0.1 | — | −0.6 |
| P | −999 | −0.5 | 0.3 | −1 | — | 0.5 | 0.7 | — | −0.3 |
| Q | −999 | 1.2 | 0 | 0 | — | −0.3 | −0.1 | — | −0.2 |
| R | −999 | 2.2 | 0.7 | −1 | — | 1 | −0.9 | — | 0.5 |
| S | −999 | −0.3 | 0.2 | 0.7 | — | −0.1 | 0.07 | — | 1.1 |
| T | −999 | 0 | 0 | −1 | — | 0.8 | −0.1 | — | −0.5 |
| V | 0 | 2.1 | 0.5 | 0 | — | 1.2 | 0.2 | — | 0.3 |
| W | −1 | −0.1 | 0 | −1 | — | −1.4 | −0.6 | — | −1 |
| Y | −1 | 0.9 | 0.8 | −1 | — | −1.4 | −0.1 | — | 0.3 |

TABLE 29
Pocket potential for HLA*0401B allele.

| Amino acid | P1 | P2 | P3 | P4 | P5 | P6 | P7 | P8 | P9 |
|---|---|---|---|---|---|---|---|---|---|
| A | −999 | 0 | 0 | 0 | — | 0 | 0 | — | 0 |
| C | −999 | 0 | 0 | 0 | — | 0 | 0 | — | 0 |
| D | −999 | −1.3 | −1.3 | 1.4 | — | −1.1 | −0.3 | — | −1.7 |
| E | −999 | 0.1 | −1.2 | 1.5 | — | −2.4 | 0.2 | — | −1.7 |
| F | 0 | 0.8 | 0.8 | −0.9 | — | −1.1 | −1 | — | −1 |
| G | −999 | 0.5 | 0.2 | −1.6 | — | −1.5 | −1.3 | — | −1 |
| H | −999 | 0.8 | 0.2 | 1.1 | — | −1.4 | 0 | — | 0.08 |
| I | −1 | 1.1 | 1.5 | 0.8 | — | −0.1 | 0.08 | — | −0.3 |
| K | −999 | 1.1 | 0 | −1.7 | — | −2.4 | −0.3 | — | −0.3 |
| L | −1 | 1 | 1 | 0.8 | — | −1.1 | 0.7 | — | −1 |
| M | −1 | 1.1 | 1.4 | 0.9 | — | −1.1 | 0.8 | — | −0.4 |
| N | −999 | 0.8 | 0.5 | 0.9 | — | 1.3 | 0.6 | — | −1.4 |
| P | −999 | −0.5 | 0.3 | −1.6 | — | 0 | −0.7 | — | −1.3 |
| Q | −999 | 1.2 | 0 | 0.8 | — | −1.5 | 0 | — | 0.5 |
| R | −999 | 2.2 | 0.7 | −1.9 | — | −2.4 | −1.2 | — | −1 |
| S | −999 | −0.3 | 0.2 | 0.8 | — | 1 | −0.2 | — | 0.7 |
| T | −999 | 0 | 0 | 0.7 | — | 1.9 | −0.1 | — | −1.2 |
| V | −1 | 2.1 | 0.5 | −0.9 | — | 0.9 | 0.08 | — | −0.7 |
| W | 0 | −0.1 | 0 | −1.2 | — | −1 | −1.4 | — | −1 |
| Y | 0 | 0.9 | 0.8 | −1.6 | — | −1.5 | −1.2 | — | −1 |

TABLE 30
Pocket potential for HLA*0701B allele.

| Amino acid | P1 | P2 | P3 | P4 | P5 | P6 | P7 | P8 | P9 |
|---|---|---|---|---|---|---|---|---|---|
| A | −999 | 0 | 0 | 0 | — | 0 | 0 | — | 0 |
| C | −999 | 0 | 0 | 0 | — | 0 | 0 | — | 0 |
| D | −999 | −1.3 | −1.3 | −1.6 | — | −2.5 | −1.3 | — | −1.2 |
| E | −999 | 0.1 | −1.2 | −1.4 | — | −2.5 | 0.9 | — | −0.3 |
| F | 0 | 0.8 | 0.8 | 0.2 | — | −0.8 | 2.1 | — | 2.1 |
| G | −999 | 0.5 | 0.2 | −1.1 | — | −0.6 | 0 | — | −0.6 |
| H | −999 | 0.8 | 0.2 | 0.1 | — | −0.8 | 0.9 | — | −0.2 |
| I | −1 | 1.1 | 1.5 | 1.1 | — | −0.5 | 2.4 | — | 3.4 |
| K | −999 | 1.1 | 0 | −1.3 | — | −1.1 | 0.5 | — | −1.1 |
| L | −1 | 1 | 1 | −0.8 | — | −0.9 | 2.2 | — | 3.4 |
| M | −1 | 1.1 | 1.4 | −0.4 | — | −0.8 | 1.8 | — | 2 |
| N | −999 | 0.8 | 0.5 | −1.1 | — | −0.6 | 1.4 | — | −0.5 |
| P | −999 | −0.5 | 0.3 | −1.2 | — | −0.5 | −0.2 | — | −0.6 |
| Q | −999 | 1.2 | 0 | −1.5 | — | −1.1 | 1.1 | — | −0.9 |
| R | −999 | 2.2 | 0.7 | −1.1 | — | −1.1 | 0.7 | — | −0.8 |
| S | −999 | −0.3 | 0.2 | 1.5 | — | 0.6 | 0.4 | — | −0.3 |
| T | −999 | 0 | 0 | 1.4 | — | −0.1 | 0.9 | — | 0.4 |
| V | −1 | 2.1 | 0.5 | 0.9 | — | 0.1 | 1.6 | — | 2 |
| W | 0 | −0.1 | 0 | −1.1 | — | −0.9 | 1.4 | — | 0.8 |
| Y | 0 | 0.9 | 0.8 | −0.9 | — | −1 | 1.7 | — | 1.1 |

TABLE 31
Pocket potential for HLA*1501B allele.

| Amino acid | P1 | P2 | P3 | P4 | P5 | P6 | P7 | P8 | P9 |
|---|---|---|---|---|---|---|---|---|---|
| A | −999 | 0 | 0 | 0 | — | 0 | 0 | — | 0 |
| C | −999 | 0 | 0 | 0 | — | 0 | 0 | — | 0 |
| D | −999 | −1.3 | −1.3 | −0.4 | — | −0.4 | −0.7 | — | −1.9 |
| E | −999 | 0.1 | −1.2 | −0.6 | — | −1 | −0.7 | — | −1.9 |
| F | −1 | 0.8 | 0.8 | 2.4 | — | −0.3 | 1.4 | — | −0.4 |
| G | −999 | 0.5 | 0.2 | 0 | — | 0.5 | 0 | — | −0.8 |
| H | −999 | 0.8 | 0.2 | 1.1 | — | −0.5 | 0.6 | — | −1.1 |
| I | 0 | 1.1 | 1.5 | 0.6 | — | 0.05 | 1.5 | — | 0.7 |
| K | −999 | 1.1 | 0 | −0.7 | — | −0.3 | −0.3 | — | −1.7 |
| L | 0 | 1 | 1 | 0.5 | — | 0.2 | 1.9 | — | 0.5 |
| M | 0 | 1.1 | 1.4 | 1 | — | 0.1 | 1.7 | — | 0.08 |
| N | −999 | 0.8 | 0.5 | −0.2 | — | 0.7 | 0.7 | — | −1.2 |
| P | −999 | −0.5 | 0.3 | −0.3 | — | −0.2 | 0.3 | — | −1.1 |
| Q | −999 | 1.2 | 0 | −0.8 | — | −0.8 | −0.3 | — | −1.6 |
| R | −999 | 2.2 | 0.7 | 0.2 | — | 1 | −0.5 | — | −1 |
| S | −999 | −0.3 | 0.2 | −0.3 | — | 0.6 | 0.3 | — | −0.3 |
| T | −999 | 0 | 0 | −0.3 | — | −0 | 0.2 | — | −0.2 |
| V | 0 | 2.1 | 0.5 | 0.2 | — | −0.3 | 0.3 | — | 0.3 |
| W | −1 | −0.1 | 0 | 0.4 | — | −0.4 | 0.6 | — | −1.4 |
| Y | −1 | 0.9 | 0.8 | 2.5 | — | 0.4 | 0.7 | — | −0.9 |

TABLE 32
Exemplary Biological Activity, Exemplary Assays and Indications

| Biologically | | | |
|---|---|---|---|
| Active Protein | Biological Activity | Exemplary Activity Assays | Indication: |
| Glucagon-Like- | Stimulates proliferation | Intestinal epithelial cell | Gastrointestinal conditions |
| Peptide 2 (GLP2; | and inhibits apoptosis | proliferation can be | including, but not limited |
| Gly² GLP-2) | of intestinal epithelial | measured using methods | to: gastrointestinal |
| | cells; reduces epithelial | known in the art, including | epithelial injury; recovery |
| | permeability; decreases | the cell proliferation | from bowel resection; |
| | gastric acid secretion | assays described in Dig. | enteritis; colitis; gastritis; |
| | and gastrointestinal | Dis. Sci. 47(5): 1135-1140 | chemotherapy-induced |
| | motility; promotes | (2002). | mucositis; short bowel |
| | wound healing. | Protection of intestinal | syndrome; intestinal |
| | | epithelium can be | atrophy; inflammatory |
| | | evaluated using methods | bowel disease; Crohn's |
| | | known in the art, including | disease; Ulcerative |
| | | the in vitro intestinal | colitis; acid reflux; peptic |
| | | injury model described in | ulcers; diabetes-associated |
| | | J. Surg. Res 107(1): 44-9 | bowel growth; intestinal |
| | | (2002). | ischemia syndromes; |
| | | GLP-2 can be assayed by | maintenance of gut |
| | | radioimmunoassay | integrity after major burn |
| | | described in Regu. | trauma; regulation of |
| | | Physiol. 278(4): R1057- | intestinal |
| | | R1063 (2000). | permeability and nutrient |
| | | Contractility of intestinal | absorption. |
| | | tissue by GLP-2 can be | Hyperglycemia; Diabetes; |
| | | measured as described in | Diabetes Insipidus; |
| | | U.S. Pat. No. 7,498,141; | Diabetes mellitus; Type 1 |
| | | Measurement of cAMP | diabetes; Type 2 diabetes; |
| | | levels in isolated rat small | Insulin resistance; Insulin |
| | | intestinal | deficiency; |
| | | mucosal cells expressing | Hyperlipidemia; |
| | | GLP-2 receptors or in | Hyperketonemia; Non- |
| | | COS cells | insulin dependent |
| | | transfected with the GLP- | Diabetes Mellitus |
| | | 2 receptor, or AP-1 | (NIDDM); Insulin- |
| | | luciferase reporter gene | dependent Diabetes |
| | | activity in BHK | Mellitus (IDDM): |
| | | fibroblast cells | Conditions associated with |
| | | endogenously expressing | Diabetes including, but |
| | | the GLP-2 receptor as | not limited to Obesity, |
| | | described in U.S. | Heart |
| | | patent application | Disease, Hyperglycemia, |
| | | No. 20110171164; | Infections, Retinopathy, |
| | | EC50 determinations by | And/Or Ulcers; Metabolic |
| | | Flipper assay measuring | Disorders; Immune |
| | | calcium flux by | Disorders; Obesity; |
| | | fluorescence triggered by | Vascular Disorders; |
| | | binding of GLP-2 to an | Suppression of Body |
| | | engineered cell line with a | Weight; Suppression of |
| | | stable GLP2-R and G a | Appetite; Syndrome X. |
| | | q/11 expression. | |

TABLE 33
Exemplary GLP2-XTEN comprising GLP-2 and terminal XTEN (SEQ ID NOS 740-774,
respectively, in order of appearance)

| GLP2- | |
|---|---|
| XTEN | |
| Name* | Amino Acid Sequence |
| GLP-2- | HADGSFSDEMNTILDNLAARDFINWLIQTKITDGGSEPATSGSETPGTSESATPESGPGSEPATS |
| AE144 | GSETPGSPAGSPTSTEEGTSTEPSEGSAPGSEPATSGSETPGSEPATSGSETPGSEPATSGSETPG |
| | TSTEPSEGSAPGTSESATPESGPGSEPATSGSETPGTSTEPSEGSAP |
| GLP-2 | HGDGSFSDEMNTILDNLAARDFINWLIQTKITDGGSEPATSGSETPGTSESATPESGPGSEPATS |
| variant 2- | GSETPGSPAGSPTSTEEGTSTEPSEGSAPGSEPATSGSETPGSEPATSGSETPGSEPATSGSETPG |
| AE144 | TSTEPSEGSAPGTSESATPESGPGSEPATSGSETPGTSTEPSEGSAP |
| GLP-2- | HADGSFSDEMNTILDNLAARDFINWLIQTKITDGGTSESATPESGPGSEPATSGSETPGTSESAT |
| AE288 | PESGPGSEPATSGSETPGTSESATPESGPGTSTEPSEGSAPGSPAGSPTSTEEGTSESATPESGPG |
| | SEPATSGSETPGTSESATPESGPGSPAGSPTSTEEGSPAGSPTSTEEGTSTEPSEGSAPGTSESATP |
| | ESGPGTSESATPESGPGTSESATPESGPGSEPATSGSETPGSEPATSGSETPGSPAGSPTSTEEGT |
| | STEPSEGSAPGTSTEPSEGSAPGSEPATSGSETPGTSESATPESGPGTSTEPSEGSAP |
| GLP-2 | HGDGSFSDEMNTILDNLAARDFINWLIQTKITDGGTSESATPESGPGSEPATSGSETPGTSESAT |
| variant 2- | PESGPGSEPATSGSETPGTSESATPESGPGTSTEPSEGSAPGSPAGSPTSTEEGTSESATPESGPG |
| AE288 | SEPATSGSETPGTSESATPESGPGSPAGSPTSTEEGSPAGSPTSTEEGTSTEPSEGSAPGTSESATP |
| | ESGPGTSESATPESGPGTSESATPESGPGSEPATSGSETPGSEPATSGSETPGSPAGSPTSTEEGT |
| | STEPSEGSAPGTSTEPSEGSAPGSEPATSGSETPGTSESATPESGPGTSTEPSEGSAP |
| GLP-2- | HADGSFSDEMNTILDNLAARDFINWLIQTKITDGGTSTPESGSASPGTSPSGESSTAPGTSPSGE |
| AF144 | SSTAPGSTSSTAESPGPGSTSESPSGTAPGSTSSTAESPGPGTSPSGESSTAPGTSTPESGSASPGS |
| | TSSTAESPGPGTSPSGESSTAPGTSPSGESSTAPGTSPSGESSTAP |
| GLP-2 | HGDGSFSDEMNTILDNLAARDFINWLIQTKITDGGTSTPESGSASPGTSPSGESSTAPGTSPSGE |
| variant 2- | SSTAPGSTSSTAESPGPGSTSESPSGTAPGSTSSTAESPGPGTSPSGESSTAPGTSTPESGSASPGS |
| AF144 | TSSTAESPGPGTSPSGESSTAPGTSPSGESSTAPGTSPSGESSTAP |
| GLP-2- | HADGSFSDEMNTILDNLAARDFINWLIQTKITDGGSSESGSSEGGPGSGGEPSESGSSGSSESGS |
| AD576 | SEGGPGSSESGSSEGGPGSSESGSSEGGPGSSESGSSEGGPGSSESGSSEGGPGESPGGSSGSESG |
| | SEGSSGPGESSGSSESGSSEGGPGSSESGSSEGGPGSSESGSSEGGPGSGGEPSESGSSGESPGGS |
| | SGSESGESPGGSSGSESGSGGEPSESGSSGSSESGSSEGGPGSGGEPSESGSSGSGGEPSESGSSG |
| | SEGSSGPGESSGESPGGSSGSESGSGGEPSESGSSGSGGEPSESGSSGSGGEPSESGSSGSSESGS |
| | SEGGPGESPGGSSGSESGESPGGSSGSESGESPGGSSGSESGESPGGSSGSESGESPGGSSGSESG |
| | SSESGSSEGGPGSGGEPSESGSSGSEGSSGPGESSGSSESGSSEGGPGSGGEPSESGSSGSSESGS |
| | SEGGPGSGGEPSESGSSGESPGGSSGSESGESPGGSSGSESGSSESGSSEGGPGSGGEPSESGSSG |
| | SSESGSSEGGPGSGGEPSESGSSGSGGEPSESGSSGESPGGSSGSESGSEGSSGPGESSGSSESGS |
| | SEGGPGSEGSSGPGESS |
| GLP-2 | HGDGSFSDEMNTILDNLAARDFINWLIQTKITDGGSSESGSSEGGPGSGGEPSESGSSGSSESGS |
| variant 2- | SEGGPGSSESGSSEGGPGSSESGSSEGGPGSSESGSSEGGPGSSESGSSEGGPGESPGGSSGSESG |
| AD576 | SEGSSGPGESSGSSESGSSEGGPGSSESGSSEGGPGSSESGSSEGGPGSGGEPSESGSSGESPGGS |
| | SGSESGESPGGSSGSESGSGGEPSESGSSGSSESGSSEGGPGSGGEPSESGSSGSGGEPSESGSSG |
| | SEGSSGPGESSGESPGGSSGSESGSGGEPSESGSSGSGGEPSESGSSGSGGEPSESGSSGSSESGS |
| | SEGGPGESPGGSSGSESGESPGGSSGSESGESPGGSSGSESGESPGGSSGSESGESPGGSSGSESG |
| | SSESGSSEGGPGSGGEPSESGSSGSEGSSGPGESSGSSESGSSEGGPGSGGEPSESGSSGSSESGS |
| | SEGGPGSGGEPSESGSSGESPGGSSGSESGESPGGSSGSESGSSESGSSEGGPGSGGEPSESGSSG |
| | SSESGSSEGGPGSGGEPSESGSSGSGGEPSESGSSGESPGGSSGSESGSEGSSGPGESSGSSESGS |
| | SEGGPGSEGSSGPGESS |
| GLP-2- | HADGSFSDEMNTILDNLAARDFINWLIQTKITDGGSPAGSPTSTEEGTSESATPESGPGTSTEPS |
| AE576 | EGSAPGSPAGSPTSTEEGTSTEPSEGSAPGTSTEPSEGSAPGTSESATPESGPGSEPATSGSETPG |
| | SEPATSGSETPGSPAGSPTSTEEGTSESATPESGPGTSTEPSEGSAPGTSTEPSEGSAPGSPAGSP |
| | TSTEEGTSTEPSEGSAPGTSTEPSEGSAPGTSESATPESGPGTSTEPSEGSAPGTSESATPESGPG |
| | SEPATSGSETPGTSTEPSEGSAPGTSTEPSEGSAPGTSESATPESGPGTSESATPESGPGSPAGSP |
| | TSTEEGTSESATPESGPGSEPATSGSETPGTSESATPESGPGTSTEPSEGSAPGTSTEPSEGSAPG |
| | TSTEPSEGSAPGTSTEPSEGSAPGTSTEPSEGSAPGTSTEPSEGSAPGSPAGSPTSTEEGTSTEPSE |
| | GSAPGTSESATPESGPGSEPATSGSETPGTSESATPESGPGSEPATSGSETPGTSESATPESGPGT |
| | STEPSEGSAPGTSESATPESGPGSPAGSPTSTEEGSPAGSPTSTEEGSPAGSPTSTEEGTSESATPE |
| | SGPGTSTEPSEGSAP |
| GLP-2 | HGDGSFSDEMNTILDNLAARDFINWLIQTKITDGGSPAGSPTSTEEGTSESATPESGPGTSTEPS |
| variant 2- | EGSAPGSPAGSPTSTEEGTSTEPSEGSAPGTSTEPSEGSAPGTSESATPESGPGSEPATSGSETPG |
| AE576 | SEPATSGSETPGSPAGSPTSTEEGTSESATPESGPGTSTEPSEGSAPGTSTEPSEGSAPGSPAGSP |
| | TSTEEGTSTEPSEGSAPGTSTEPSEGSAPGTSESATPESGPGTSTEPSEGSAPGTSESATPESGPG |
| | SEPATSGSETPGTSTEPSEGSAPGTSTEPSEGSAPGTSESATPESGPGTSESATPESGPGSPAGSP |
| | TSTEEGTSESATPESGPGSEPATSGSETPGTSESATPESGPGTSTEPSEGSAPGTSTEPSEGSAPG |
| | TSTEPSEGSAPGTSTEPSEGSAPGTSTEPSEGSAPGTSTEPSEGSAPGSPAGSPTSTEEGTSTEPSE |
| | GSAPGTSESATPESGPGSEPATSGSETPGTSESATPESGPGSEPATSGSETPGTSESATPESGPGT |
| | STEPSEGSAPGTSESATPESGPGSPAGSPTSTEEGSPAGSPTSTEEGSPAGSPTSTEEGTSESATPE |
| | SGPGTSTEPSEGSAP |
| GLP-2- | HADGSFSDEMNTILDNLAARDFINWLIQTKITDGGSTSSTAESPGPGSTSSTAESPGPGSTSESP |
| AF576 | SGTAPGSTSSTAESPGPGSTSSTAESPGPGTSTPESGSASPGSTSESPSGTAPGTSPSGESSTAPGS |
| | TSESPSGTAPGSTSESPSGTAPGTSPSGESSTAPGSTSESPSGTAPGSTSESPSGTAPGTSPSGESS |
| | TAPGSTSESPSGTAPGSTSESPSGTAPGSTSESPSGTAPGTSTPESGSASPGSTSESPSGTAPGTST |
| | PESGSASPGSTSSTAESPGPGSTSSTAESPGPGTSTPESGSASPGTSTPESGSASPGSTSESPSGTA |
| | PGTSTPESGSASPGTSTPESGSASPGSTSESPSGTAPGSTSESPSGTAPGSTSESPSGTAPGSTSST |
| | AESPGPGTSTPESGSASPGTSTPESGSASPGSTSESPSGTAPGSTSESPSGTAPGTSTPESGSASPG |
| | STSESPSGTAPGSTSESPSGTAPGTSTPESGSASPGTSPSGESSTAPGSTSSTAESPGPGTSPSGES |
| | STAPGSTSSTAESPGPGTSTPESGSASPGSTSESPSGTAPGSTSSTAESPGPGTSTPESGSASPGTS |
| | TPESGSASP |
| GLP-2 | HGDGSFSDEMNTILDNLAARDFINWLIQTKITDGGSTSSTAESPGPGSTSSTAESPGPGSTSESP |
| variant 2- | SGTAPGSTSSTAESPGPGSTSSTAESPGPGTSTPESGSASPGSTSESPSGTAPGTSPSGESSTAPGS |
| AF576 | TSESPSGTAPGSTSESPSGTAPGTSPSGESSTAPGSTSESPSGTAPGSTSESPSGTAPGTSPSGESS |
| | TAPGSTSESPSGTAPGSTSESPSGTAPGSTSESPSGTAPGTSTPESGSASPGSTSESPSGTAPGTST |
| | PESGSASPGSTSSTAESPGPGSTSSTAESPGPGTSTPESGSASPGTSTPESGSASPGSTSESPSGTA |
| | PGTSTPESGSASPGTSTPESGSASPGSTSESPSGTAPGSTSESPSGTAPGSTSESPSGTAPGSTSST |
| | AESPGPGTSTPESGSASPGTSTPESGSASPGSTSESPSGTAPGSTSESPSGTAPGTSTPESGSASPG |
| | STSESPSGTAPGSTSESPSGTAPGTSTPESGSASPGTSPSGESSTAPGSTSSTAESPGPGTSPSGES |
| | STAPGSTSSTAESPGPGTSTPESGSASPGSTSESPSGTAPGSTSSTAESPGPGTSTPESGSASPGTS |
| | TPESGSASP |
| GLP-2 | HGDGSFSDEMNTILDNLAARDFINWLIQTKITDGMAEPAGSPTSTEEGTPGSGTASSSPGSSTP |
| variant 2- | SGATGSPGASPGTSSTGSPGSPAGSPTSTEEGTSESATPESGPGTSTEPSEGSAPGSPAGSPTSTE |
| AE624 | EGTSTEPSEGSAPGTSTEPSEGSAPGTSESATPESGPGSEPATSGSETPGSEPATSGSETPGSPAG |
| | SPTSTEEGTSESATPESGPGTSTEPSEGSAPGTSTEPSEGSAPGSPAGSPTSTEEGTSTEPSEGSAP |
| | GTSTEPSEGSAPGTSESATPESGPGTSTEPSEGSAPGTSESATPESGPGSEPATSGSETPGTSTEPS |
| | EGSAPGTSTEPSEGSAPGTSESATPESGPGTSESATPESGPGSPAGSPTSTEEGTSESATPESGPG |
| | SEPATSGSETPGTSESATPESGPGTSTEPSEGSAPGTSTEPSEGSAPGTSTEPSEGSAPGTSTEPSE |
| | GSAPGTSTEPSEGSAPGTSTEPSEGSAPGSPAGSPTSTEEGTSTEPSEGSAPGTSESATPESGPGS |
| | EPATSGSETPGTSESATPESGPGSEPATSGSETPGTSESATPESGPGTSTEPSEGSAPGTSESATP |
| | ESGPGSPAGSPTSTEEGSPAGSPTSTEEGSPAGSPTSTEEGTSESATPESGPGTSTEPSEGSAP |
| GLP-2- | HADGSFSDEMNTILDNLAARDFINWLIQTKITDGGSSESGSSEGGPGSSESGSSEGGPGESPGG |
| AD836 | SSGSESGSGGEPSESGSSGESPGGSSGSESGESPGGSSGSESGSSESGSSEGGPGSSESGSSEGGP |
| | GSSESGSSEGGPGESPGGSSGSESGESPGGSSGSESGESPGGSSGSESGSSESGSSEGGPGSSESG |
| | SSEGGPGSSESGSSEGGPGSSESGSSEGGPGSSESGSSEGGPGSSESGSSEGGPGSGGEPSESGSS |
| | GESPGGSSGSESGESPGGSSGSESGSGGEPSESGSSGSEGSSGPGESSGSSESGSSEGGPGSGGEP |
| | SESGSSGSEGSSGPGESSGSSESGSSEGGPGSGGEPSESGSSGESPGGSSGSESGSGGEPSESGSS |
| | GSGGEPSESGSSGSSESGSSEGGPGSGGEPSESGSSGSGGEPSESGSSGSEGSSGPGESSGESPGG |
| | SSGSESGSEGSSGPGESSGSEGSSGPGESSGSGGEPSESGSSGSSESGSSEGGPGSSESGSSEGGP |
| | GESPGGSSGSESGSGGEPSESGSSGSEGSSGPGESSGESPGGSSGSESGSEGSSGPGSSESGSSEG |
| | GPGSGGEPSESGSSGSEGSSGPGESSGSEGSSGPGESSGSEGSSGPGESSGSGGEPSESGSSGSG |
| | GEPSESGSSGESPGGSSGSESGESPGGSSGSESGSGGEPSESGSSGSEGSSGPGESSGESPGGSSG |
| | SESGSSESGSSEGGPGSSESGSSEGGPGSSESGSSEGGPGSGGEPSESGSSGSSESGSSEGGPGES |
| | PGGSSGSESGSGGEPSESGSSGSSESGSSEGGPGESPGGSSGSESGSGGEPSESGSSGESPGGSSG |
| | SESGSGGEPSESGSS |
| GLP-2 | HGDGSFSDEMNTILDNLAARDFINWLIQTKITDGGSSESGSSEGGPGSSESGSSEGGPGESPGG |
| variant 2- | SSGSESGSGGEPSESGSSGESPGGSSGSESGESPGGSSGSESGSSESGSSEGGPGSSESGSSEGGP |
| AD836 | GSSESGSSEGGPGESPGGSSGSESGESPGGSSGSESGESPGGSSGSESGSSESGSSEGGPGSSESG |
| | SSEGGPGSSESGSSEGGPGSSESGSSEGGPGSSESGSSEGGPGSSESGSSEGGPGSGGEPSESGSS |
| | GESPGGSSGSESGESPGGSSGSESGSGGEPSESGSSGSEGSSGPGESSGSSESGSSEGGPGSGGEP |
| | SESGSSGSEGSSGPGESSGSSESGSSEGGPGSGGEPSESGSSGESPGGSSGSESGSGGEPSESGSS |
| | GSGGEPSESGSSGSSESGSSEGGPGSGGEPSESGSSGSGGEPSESGSSGSEGSSGPGESSGESPGG |
| | SSGSESGSEGSSGPGESSGSEGSSGPGESSGSGGEPSESGSSGSSESGSSEGGPGSSESGSSEGGP |
| | GESPGGSSGSESGSGGEPSESGSSGSEGSSGPGESSGESPGGSSGSESGSEGSSGPGSSESGSSEG |
| | GPGSGGEPSESGSSGSEGSSGPGESSGSEGSSGPGESSGSEGSSGPGESSGSGGEPSESGSSGSG |
| | GEPSESGSSGESPGGSSGSESGESPGGSSGSESGSGGEPSESGSSGSEGSSGPGESSGESPGGSSG |
| | SESGSSESGSSEGGPGSSESGSSEGGPGSSESGSSEGGPGSGGEPSESGSSGSSESGSSEGGPGES |
| | PGGSSGSESGSGGEPSESGSSGSSESGSSEGGPGESPGGSSGSESGSGGEPSESGSSGESPGGSSG |
| | SESGSGGEPSESGSS |
| GLP-2- | HADGSFSDEMNTILDNLAARDFINWLIQTKITDGGSPAGSPTSTEEGTSESATPESGPGTSTEPS |
| AE864 | EGSAPGSPAGSPTSTEEGTSTEPSEGSAPGTSTEPSEGSAPGTSESATPESGPGSEPATSGSETPG |
| | SEPATSGSETPGSPAGSPTSTEEGTSESATPESGPGTSTEPSEGSAPGTSTEPSEGSAPGSPAGSP |
| | TSTEEGTSTEPSEGSAPGTSTEPSEGSAPGTSESATPESGPGTSTEPSEGSAPGTSESATPESGPG |
| | SEPATSGSETPGTSTEPSEGSAPGTSTEPSEGSAPGTSESATPESGPGTSESATPESGPGSPAGSP |
| | TSTEEGTSESATPESGPGSEPATSGSETPGTSESATPESGPGTSTEPSEGSAPGTSTEPSEGSAPG |
| | TSTEPSEGSAPGTSTEPSEGSAPGTSTEPSEGSAPGTSTEPSEGSAPGSPAGSPTSTEEGTSTEPSE |
| | GSAPGTSESATPESGPGSEPATSGSETPGTSESATPESGPGSEPATSGSETPGTSESATPESGPGT |
| | STEPSEGSAPGTSESATPESGPGSPAGSPTSTEEGSPAGSPTSTEEGSPAGSPTSTEEGTSESATPE |
| | SGPGTSTEPSEGSAPGTSESATPESGPGSEPATSGSETPGTSESATPESGPGSEPATSGSETPGTS |
| | ESATPESGPGTSTEPSEGSAPGSPAGSPTSTEEGTSESATPESGPGSEPATSGSETPGTSESATPES |
| | GPGSPAGSPTSTEEGSPAGSPTSTEEGTSTEPSEGSAPGTSESATPESGPGTSESATPESGPGTSE |
| | SATPESGPGSEPATSGSETPGSEPATSGSETPGSPAGSPTSTEEGTSTEPSEGSAPGTSTEPSEGS |
| | APGSEPATSGSETPGTSESATPESGPGTSTEPSEGSAPG |
| GLP-2 | HGDGSFSDEMNTILDNLAARDFINWLIQTKITDGGSPAGSPTSTEEGTSESATPESGPGTSTEPS |
| variant 2- | EGSAPGSPAGSPTSTEEGTSTEPSEGSAPGTSTEPSEGSAPGTSESATPESGPGSEPATSGSETPG |
| AE864 | SEPATSGSETPGSPAGSPTSTEEGTSESATPESGPGTSTEPSEGSAPGTSTEPSEGSAPGSPAGSP |
| | TSTEEGTSTEPSEGSAPGTSTEPSEGSAPGTSESATPESGPGTSTEPSEGSAPGTSESATPESGPG |
| | SEPATSGSETPGTSTEPSEGSAPGTSTEPSEGSAPGTSESATPESGPGTSESATPESGPGSPAGSP |
| | TSTEEGTSESATPESGPGSEPATSGSETPGTSESATPESGPGTSTEPSEGSAPGTSTEPSEGSAPG |
| | TSTEPSEGSAPGTSTEPSEGSAPGTSTEPSEGSAPGTSTEPSEGSAPGSPAGSPTSTEEGTSTEPSE |
| | GSAPGTSESATPESGPGSEPATSGSETPGTSESATPESGPGSEPATSGSETPGTSESATPESGPGT |
| | STEPSEGSAPGTSESATPESGPGSPAGSPTSTEEGSPAGSPTSTEEGSPAGSPTSTEEGTSESATPE |
| | SGPGTSTEPSEGSAPGTSESATPESGPGSEPATSGSETPGTSESATPESGPGSEPATSGSETPGTS |
| | ESATPESGPGTSTEPSEGSAPGSPAGSPTSTEEGTSESATPESGPGSEPATSGSETPGTSESATPES |
| | GPGSPAGSPTSTEEGSPAGSPTSTEEGTSTEPSEGSAPGTSESATPESGPGTSESATPESGPGTSE |
| | SATPESGPGSEPATSGSETPGSEPATSGSETPGSPAGSPTSTEEGTSTEPSEGSAPGTSTEPSEGS |
| | APGSEPATSGSETPGTSESATPESGPGTSTEPSEGSAPG |
| GLP-2 | HADGSFSDEMNTILDNLATRDFINWLIQTKITDGGSPAGSPTSTEEGTSESATPESGPGTSTEPS |
| variant 1- | EGSAPGSPAGSPTSTEEGTSTEPSEGSAPGTSTEPSEGSAPGTSESATPESGPGSEPATSGSETPG |
| AE864 | SEPATSGSETPGSPAGSPTSTEEGTSESATPESGPGTSTEPSEGSAPGTSTEPSEGSAPGSPAGSP |
| | TSTEEGTSTEPSEGSAPGTSTEPSEGSAPGTSESATPESGPGTSTEPSEGSAPGTSESATPESGPG |
| | SEPATSGSETPGTSTEPSEGSAPGTSTEPSEGSAPGTSESATPESGPGTSESATPESGPGSPAGSP |
| | TSTEEGTSESATPESGPGSEPATSGSETPGTSESATPESGPGTSTEPSEGSAPGTSTEPSEGSAPG |
| | TSTEPSEGSAPGTSTEPSEGSAPGTSTEPSEGSAPGTSTEPSEGSAPGSPAGSPTSTEEGTSTEPSE |
| | GSAPGTSESATPESGPGSEPATSGSETPGTSESATPESGPGSEPATSGSETPGTSESATPESGPGT |
| | STEPSEGSAPGTSESATPESGPGSPAGSPTSTEEGSPAGSPTSTEEGSPAGSPTSTEEGTSESATPE |
| | SGPGTSTEPSEGSAPGTSESATPESGPGSEPATSGSETPGTSESATPESGPGSEPATSGSETPGTS |
| | ESATPESGPGTSTEPSEGSAPGSPAGSPTSTEEGTSESATPESGPGSEPATSGSETPGTSESATPES |
| | GPGSPAGSPTSTEEGSPAGSPTSTEEGTSTEPSEGSAPGTSESATPESGPGTSESATPESGPGTSE |
| | SATPESGPGSEPATSGSETPGSEPATSGSETPGSPAGSPTSTEEGTSTEPSEGSAPGTSTEPSEGS |
| | APGSEPATSGSETPGTSESATPESGPGTSTEPSEGSAPG |
| GLP-2 | HVDGSFSDEMNTILDNLAARDFINWLIQTKITDGGSPAGSPTSTEEGTSESATPESGPGTSTEPS |
| variant 3- | EGSAPGSPAGSPTSTEEGTSTEPSEGSAPGTSTEPSEGSAPGTSESATPESGPGSEPATSGSETPG |
| AE864 | SEPATSGSETPGSPAGSPTSTEEGTSESATPESGPGTSTEPSEGSAPGTSTEPSEGSAPGSPAGSP |
| | TSTEEGTSTEPSEGSAPGTSTEPSEGSAPGTSESATPESGPGTSTEPSEGSAPGTSESATPESGPG |
| | SEPATSGSETPGTSTEPSEGSAPGTSTEPSEGSAPGTSESATPESGPGTSESATPESGPGSPAGSP |
| | TSTEEGTSESATPESGPGSEPATSGSETPGTSESATPESGPGTSTEPSEGSAPGTSTEPSEGSAPG |
| | TSTEPSEGSAPGTSTEPSEGSAPGTSTEPSEGSAPGTSTEPSEGSAPGSPAGSPTSTEEGTSTEPSE |
| | GSAPGTSESATPESGPGSEPATSGSETPGTSESATPESGPGSEPATSGSETPGTSESATPESGPGT |
| | STEPSEGSAPGTSESATPESGPGSPAGSPTSTEEGSPAGSPTSTEEGSPAGSPTSTEEGTSESATPE |
| | SGPGTSTEPSEGSAPGTSESATPESGPGSEPATSGSETPGTSESATPESGPGSEPATSGSETPGTS |
| | ESATPESGPGTSTEPSEGSAPGSPAGSPTSTEEGTSESATPESGPGSEPATSGSETPGTSESATPES |
| | GPGSPAGSPTSTEEGSPAGSPTSTEEGTSTEPSEGSAPGTSESATPESGPGTSESATPESGPGTSE |
| | SATPESGPGSEPATSGSETPGSEPATSGSETPGSPAGSPTSTEEGTSTEPSEGSAPGTSTEPSEGS |
| | APGSEPATSGSETPGTSESATPESGPGTSTEPSEGSAPG |
| GLP-2- | HADGSFSDEMNTILDNLAARDFINWLIQTKITDGGSTSESPSGTAPGTSPSGESSTAPGSTSESP |
| AF864 | SGTAPGSTSESPSGTAPGTSTPESGSASPGTSTPESGSASPGSTSESPSGTAPGSTSESPSGTAPGT |
| | SPSGESSTAPGSTSESPSGTAPGTSPSGESSTAPGTSPSGESSTAPGSTSSTAESPGPGTSPSGESS |
| | TAPGTSPSGESSTAPGSTSSTAESPGPGTSTPESGSASPGTSTPESGSASPGSTSESPSGTAPGSTS |
| | ESPSGTAPGTSTPESGSASPGSTSSTAESPGPGTSTPESGSASPGSTSESPSGTAPGTSPSGESSTA |
| | PGSTSSTAESPGPGTSPSGESSTAPGTSTPESGSASPGSTSSTAESPGPGSTSSTAESPGPGSTSST |
| | AESPGPGSTSSTAESPGPGTSPSGESSTAPGSTSESPSGTAPGSTSESPSGTAPGTSTPESGPXXX |
| | GASASGAPSTXXXXSESPSGTAPGSTSESPSGTAPGSTSESPSGTAPGSTSESPSGTAPGSTSESP |
| | SGTAPGSTSESPSGTAPGTSTPESGSASPGTSPSGESSTAPGTSPSGESSTAPGSTSSTAESPGPGT |
| | SPSGESSTAPGTSTPESGSASPGSTSESPSGTAPGSTSESPSGTAPGTSPSGESSTAPGSTSESPSG |
| | TAPGTSTPESGSASPGTSTPESGSASPGSTSESPSGTAPGTSTPESGSASPGSTSSTAESPGPGSTS |
| | ESPSGTAPGSTSESPSGTAPGTSPSGESSTAPGSTSSTAESPGPGTSPSGESSTAPGTSTPESGSAS |
| | PGTSPSGESSTAPGTSPSGESSTAPGTSPSGESSTAPGSTSSTAESPGPGSTSSTAESPGPGTSPSG |
| | ESSTAPGSSPSASTGTGPGSSTPSGATGSPGSSTPSGATGSP |
| GLP-2 | HGDGSFSDEMNTILDNLAARDFINWLIQTKITDGGSTSESPSGTAPGTSPSGESSTAPGSTSESP |
| variant 2- | SGTAPGSTSESPSGTAPGTSTPESGSASPGTSTPESGSASPGSTSESPSGTAPGSTSESPSGTAPGT |
| AF864 | SPSGESSTAPGSTSESPSGTAPGTSPSGESSTAPGTSPSGESSTAPGSTSSTAESPGPGTSPSGESS |
| | TAPGTSPSGESSTAPGSTSSTAESPGPGTSTPESGSASPGTSTPESGSASPGSTSESPSGTAPGSTS |
| | ESPSGTAPGTSTPESGSASPGSTSSTAESPGPGTSTPESGSASPGSTSESPSGTAPGTSPSGESSTA |
| | PGSTSSTAESPGPGTSPSGESSTAPGTSTPESGSASPGSTSSTAESPGPGSTSSTAESPGPGSTSST |
| | AESPGPGSTSSTAESPGPGTSPSGESSTAPGSTSESPSGTAPGSTSESPSGTAPGTSTPESGPXXX |
| | GASASGAPSTXXXXSESPSGTAPGSTSESPSGTAPGSTSESPSGTAPGSTSESPSGTAPGSTSESP |
| | SGTAPGSTSESPSGTAPGTSTPESGSASPGTSPSGESSTAPGTSPSGESSTAPGSTSSTAESPGPGT |
| | SPSGESSTAPGTSTPESGSASPGSTSESPSGTAPGSTSESPSGTAPGTSPSGESSTAPGSTSESPSG |
| | TAPGTSTPESGSASPGTSTPESGSASPGSTSESPSGTAPGTSTPESGSASPGSTSSTAESPGPGSTS |
| | ESPSGTAPGSTSESPSGTAPGTSPSGESSTAPGSTSSTAESPGPGTSPSGESSTAPGTSTPESGSAS |
| | PGTSPSGESSTAPGTSPSGESSTAPGTSPSGESSTAPGSTSSTAESPGPGSTSSTAESPGPGTSPSG |
| | ESSTAPGSSPSASTGTGPGSSTPSGATGSPGSSTPSGATGSP |
| GLP-2- | HADGSFSDEMNTILDNLAARDFINWLIQTKITDGGASPGTSSTGSPGSSPSASTGTGPGSSPSAS |
| AG864 | TGTGPGTPGSGTASSSPGSSTPSGATGSPGSNPSASTGTGPGASPGTSSTGSPGTPGSGTASSSP |
| | GSSTPSGATGSPGTPGSGTASSSPGASPGTSSTGSPGASPGTSSTGSPGTPGSGTASSSPGSSTPS |
| | GATGSPGASPGTSSTGSPGTPGSGTASSSPGSSTPSGATGSPGSNPSASTGTGPGSSPSASTGTG |
| | PGSSTPSGATGSPGSSTPSGATGSPGASPGTSSTGSPGASPGTSSTGSPGASPGTSSTGSPGTPGS |
| | GTASSSPGASPGTSSTGSPGASPGTSSTGSPGASPGTSSTGSPGSSPSASTGTGPGTPGSGTASSS |
| | PGASPGTSSTGSPGASPGTSSTGSPGASPGTSSTGSPGSSTPSGATGSPGSSTPSGATGSPGASPG |
| | TSSTGSPGTPGSGTASSSPGSSTPSGATGSPGSSTPSGATGSPGSSTPSGATGSPGSSPSASTGTG |
| | PGASPGTSSTGSPGASPGTSSTGSPGTPGSGTASSSPGASPGTSSTGSPGASPGTSSTGSPGASPG |
| | TSSTGSPGASPGTSSTGSPGTPGSGTASSSPGSSTPSGATGSPGTPGSGTASSSPGSSTPSGATGS |
| | PGTPGSGTASSSPGSSTPSGATGSPGSSTPSGATGSPGSSPSASTGTGPGSSPSASTGTGPGASPG |
| | TSSTGSPGTPGSGTASSSPGSSTPSGATGSPGSSPSASTGTGPGSSPSASTGTGPGASPGTSSTGS |
| | PGASPGTSSTGSPGSSTPSGATGSPGSSPSASTGTGPGASPGTSSTGSPGSSPSASTGTGPGTPGS |
| | GTASSSPGSSTPSGATGSPGSSTPSGATGSPGASPGTSSTGSP |
| GLP-2 | HGDGSFSDEMNTILDNLAARDFINWLIQTKITDGGASPGTSSTGSPGSSPSASTGTGPGSSPSAS |
| variant 2- | TGTGPGTPGSGTASSSPGSSTPSGATGSPGSNPSASTGTGPGASPGTSSTGSPGTPGSGTASSSP |
| AG864 | GSSTPSGATGSPGTPGSGTASSSPGASPGTSSTGSPGASPGTSSTGSPGTPGSGTASSSPGSSTPS |
| | GATGSPGASPGTSSTGSPGTPGSGTASSSPGSSTPSGATGSPGSNPSASTGTGPGSSPSASTGTG |
| | PGSSTPSGATGSPGSSTPSGATGSPGASPGTSSTGSPGASPGTSSTGSPGASPGTSSTGSPGTPGS |
| | GTASSSPGASPGTSSTGSPGASPGTSSTGSPGASPGTSSTGSPGSSPSASTGTGPGTPGSGTASSS |
| | PGASPGTSSTGSPGASPGTSSTGSPGASPGTSSTGSPGSSTPSGATGSPGSSTPSGATGSPGASPG |
| | TSSTGSPGTPGSGTASSSPGSSTPSGATGSPGSSTPSGATGSPGSSTPSGATGSPGSSPSASTGTG |
| | PGASPGTSSTGSPGASPGTSSTGSPGTPGSGTASSSPGASPGTSSTGSPGASPGTSSTGSPGASPG |
| | TSSTGSPGASPGTSSTGSPGTPGSGTASSSPGSSTPSGATGSPGTPGSGTASSSPGSSTPSGATGS |
| | PGTPGSGTASSSPGSSTPSGATGSPGSSTPSGATGSPGSSPSASTGTGPGSSPSASTGTGPGASPG |
| | TSSTGSPGTPGSGTASSSPGSSTPSGATGSPGSSPSASTGTGPGSSPSASTGTGPGASPGTSSTGS |
| | PGASPGTSSTGSPGSSTPSGATGSPGSSPSASTGTGPGASPGTSSTGSPGSSPSASTGTGPGTPGS |
| | GTASSSPGSSTPSGATGSPGSSTPSGATGSPGASPGTSSTGSP |
| GLP-2 | HGDGSFSDEMNTILDNLAARDFINWLIQTKITDGGTSTEPSEGSAPGSEPATSGSETPGSPAGSP |
| variant 2- | TSTEEGSTSSTAESPGPGTSTPESGSASPGSTSESPSGTAPGSTSESPSGTAPGTSTPESGSASPGT |
| AM875 | STPESGSASPGSEPATSGSETPGTSESATPESGPGSPAGSPTSTEEGTSTEPSEGSAPGTSESATPE |
| | SGPGTSTEPSEGSAPGTSTEPSEGSAPGSPAGSPTSTEEGTSTEPSEGSAPGTSTEPSEGSAPGTS |
| | ESATPESGPGTSESATPESGPGTSTEPSEGSAPGTSTEPSEGSAPGTSESATPESGPGTSTEPSEGS |
| | APGSEPATSGSETPGSPAGSPTSTEEGSSTPSGATGSPGTPGSGTASSSPGSSTPSGATGSPGTST |
| | EPSEGSAPGTSTEPSEGSAPGSEPATSGSETPGSPAGSPTSTEEGSPAGSPTSTEEGTSTEPSEGS |
| | APGASASGAPSTGGTSESATPESGPGSPAGSPTSTEEGSPAGSPTSTEEGSTSSTAESPGPGSTSE |
| | SPSGTAPGTSPSGESSTAPGTPGSGTASSSPGSSTPSGATGSPGSSPSASTGTGPGSEPATSGSET |
| | PGTSESATPESGPGSEPATSGSETPGSTSSTAESPGPGSTSSTAESPGPGTSPSGESSTAPGSEPAT |
| | SGSETPGSEPATSGSETPGTSTEPSEGSAPGSTSSTAESPGPGTSTPESGSASPGSTSESPSGTAPG |
| | TSTEPSEGSAPGTSTEPSEGSAPGTSTEPSEGSAPGSSTPSGATGSPGSSPSASTGTGPGASPGTS |
| | STGSPGSEPATSGSETPGTSESATPESGPGSPAGSPTSTEEGSSTPSGATGSPGSSPSASTGTGPG |
| | ASPGTSSTGSPGTSESATPESGPGTSTEPSEGSAPGTSTEPSEGSAP |
| GLP-2 | HADGSFSDEMNTVLDSLATRDFINWLLQTKITDGGSPAGSPTSTEEGTSESATPESGPGTSTEP |
| bovine- | SEGSAPGSPAGSPTSTEEGTSTEPSEGSAPGTSTEPSEGSAPGTSESATPESGPGSEPATSGSETP |
| AE864 | GSEPATSGSETPGSPAGSPTSTEEGTSESATPESGPGTSTEPSEGSAPGTSTEPSEGSAPGSPAGS |
| | PTSTEEGTSTEPSEGSAPGTSTEPSEGSAPGTSESATPESGPGTSTEPSEGSAPGTSESATPESGP |
| | GSEPATSGSETPGTSTEPSEGSAPGTSTEPSEGSAPGTSESATPESGPGTSESATPESGPGSPAGS |
| | PTSTEEGTSESATPESGPGSEPATSGSETPGTSESATPESGPGTSTEPSEGSAPGTSTEPSEGSAP |
| | GTSTEPSEGSAPGTSTEPSEGSAPGTSTEPSEGSAPGTSTEPSEGSAPGSPAGSPTSTEEGTSTEPS |
| | EGSAPGTSESATPESGPGSEPATSGSETPGTSESATPESGPGSEPATSGSETPGTSESATPESGPG |
| | TSTEPSEGSAPGTSESATPESGPGSPAGSPTSTEEGSPAGSPTSTEEGSPAGSPTSTEEGTSESATP |
| | ESGPGTSTEPSEGSAPGTSESATPESGPGSEPATSGSETPGTSESATPESGPGSEPATSGSETPGT |
| | SESATPESGPGTSTEPSEGSAPGSPAGSPTSTEEGTSESATPESGPGSEPATSGSETPGTSESATPE |
| | SGPGSPAGSPTSTEEGSPAGSPTSTEEGTSTEPSEGSAPGTSESATPESGPGTSESATPESGPGTS |
| | ESATPESGPGSEPATSGSETPGSEPATSGSETPGSPAGSPTSTEEGTSTEPSEGSAPGTSTEPSEGS |
| | APGSEPATSGSETPGTSESATPESGPGTSTEPSEGSAPG |
| GLP-2 pig- | HADGSFSDEMNTVLDNLATRDFINWLLHTKITDSLGGASPGTSSTGSPGSSPSASTGTGPGSSP |
| AG864 | SASTGTGPGTPGSGTASSSPGSSTPSGATGSPGSNPSASTGTGPGASPGTSSTGSPGTPGSGTAS |
| | SSPGSSTPSGATGSPGTPGSGTASSSPGASPGTSSTGSPGASPGTSSTGSPGTPGSGTASSSPGSS |
| | TPSGATGSPGASPGTSSTGSPGTPGSGTASSSPGSSTPSGATGSPGSNPSASTGTGPGSSPSASTG |
| | TGPGSSTPSGATGSPGSSTPSGATGSPGASPGTSSTGSPGASPGTSSTGSPGASPGTSSTGSPGTP |
| | GSGTASSSPGASPGTSSTGSPGASPGTSSTGSPGASPGTSSTGSPGSSPSASTGTGPGTPGSGTAS |
| | SSPGASPGTSSTGSPGASPGTSSTGSPGASPGTSSTGSPGSSTPSGATGSPGSSTPSGATGSPGAS |
| | PGTSSTGSPGTPGSGTASSSPGSSTPSGATGSPGSSTPSGATGSPGSSTPSGATGSPGSSPSASTG |
| | TGPGASPGTSSTGSPGASPGTSSTGSPGTPGSGTASSSPGASPGTSSTGSPGASPGTSSTGSPGAS |
| | PGTSSTGSPGASPGTSSTGSPGTPGSGTASSSPGSSTPSGATGSPGTPGSGTASSSPGSSTPSGAT |
| | GSPGTPGSGTASSSPGSSTPSGATGSPGSSTPSGATGSPGSSPSASTGTGPGSSPSASTGTGPGAS |
| | PGTSSTGSPGTPGSGTASSSPGSSTPSGATGSPGSSPSASTGTGPGSSPSASTGTGPGASPGTSST |
| | GSPGASPGTSSTGSPGSSTPSGATGSPGSSPSASTGTGPGASPGTSSTGSPGSSPSASTGTGPGTP |
| | GSGTASSSPGSSTPSGATGSPGSSTPSGATGSPGASPGTSSTGSP |
| GLP-2 rat- | HADGSFSDEMNTILDNLATRDFINWLIQTKITDGGSPAGSPTSTEEGTSESATPESGPGTSTEPS |
| AE576 | EGSAPGSPAGSPTSTEEGTSTEPSEGSAPGTSTEPSEGSAPGTSESATPESGPGSEPATSGSETPG |
| | SEPATSGSETPGSPAGSPTSTEEGTSESATPESGPGTSTEPSEGSAPGTSTEPSEGSAPGSPAGSP |
| | TSTEEGTSTEPSEGSAPGTSTEPSEGSAPGTSESATPESGPGTSTEPSEGSAPGTSESATPESGPG |
| | SEPATSGSETPGTSTEPSEGSAPGTSTEPSEGSAPGTSESATPESGPGTSESATPESGPGSPAGSP |
| | TSTEEGTSESATPESGPGSEPATSGSETPGTSESATPESGPGTSTEPSEGSAPGTSTEPSEGSAPG |
| | TSTEPSEGSAPGTSTEPSEGSAPGTSTEPSEGSAPGTSTEPSEGSAPGSPAGSPTSTEEGTSTEPSE |
| | GSAPGTSESATPESGPGSEPATSGSETPGTSESATPESGPGSEPATSGSETPGTSESATPESGPGT |
| | STEPSEGSAPGTSESATPESGPGSPAGSPTSTEEGSPAGSPTSTEEGSPAGSPTSTEEGTSESATPE |
| | SGPGTSTEPSEGSAP |
| GLP-2 | HKDGSFSDEMNTILDNLAARDFINWLIQTKITDGGSTSESPSGTAPGTSPSGESSTAPGSTSESP |
| variant 5- | SGTAPGSTSESPSGTAPGTSTPESGSASPGTSTPESGSASPGSTSESPSGTAPGSTSESPSGTAPGT |
| AF864 | SPSGESSTAPGSTSESPSGTAPGTSPSGESSTAPGTSPSGESSTAPGSTSSTAESPGPGTSPSGESS |
| | TAPGTSPSGESSTAPGSTSSTAESPGPGTSTPESGSASPGTSTPESGSASPGSTSESPSGTAPGSTS |
| | ESPSGTAPGTSTPESGSASPGSTSSTAESPGPGTSTPESGSASPGSTSESPSGTAPGTSPSGESSTA |
| | PGSTSSTAESPGPGTSPSGESSTAPGTSTPESGSASPGSTSSTAESPGPGSTSSTAESPGPGSTSST |
| | AESPGPGSTSSTAESPGPGTSPSGESSTAPGSTSESPSGTAPGSTSESPSGTAPGTSTPESGPXXX |
| | GASASGAPSTXXXXSESPSGTAPGSTSESPSGTAPGSTSESPSGTAPGSTSESPSGTAPGSTSESP |
| | SGTAPGSTSESPSGTAPGTSTPESGSASPGTSPSGESSTAPGTSPSGESSTAPGSTSSTAESPGPGT |
| | SPSGESSTAPGTSTPESGSASPGSTSESPSGTAPGSTSESPSGTAPGTSPSGESSTAPGSTSESPSG |
| | TAPGTSTPESGSASPGTSTPESGSASPGSTSESPSGTAPGTSTPESGSASPGSTSSTAESPGPGSTS |
| | ESPSGTAPGSTSESPSGTAPGTSPSGESSTAPGSTSSTAESPGPGTSPSGESSTAPGTSTPESGSAS |
| | PGTSPSGESSTAPGTSPSGESSTAPGTSPSGESSTAPGSTSSTAESPGPGSTSSTAESPGPGTSPSG |
| | ESSTAPGSSPSASTGTGPGSSTPSGATGSPGSSTPSGATGSP |
| GLP-2 | HRDGSFSDEMNTILDNLAARDFINWLIQTKITDGGSPAGSPTSTEEGTSESATPESGPGTSTEPS |
| variant 6- | EGSAPGSPAGSPTSTEEGTSTEPSEGSAPGTSTEPSEGSAPGTSESATPESGPGSEPATSGSETPG |
| AE864 | SEPATSGSETPGSPAGSPTSTEEGTSESATPESGPGTSTEPSEGSAPGTSTEPSEGSAPGSPAGSP |
| | TSTEEGTSTEPSEGSAPGTSTEPSEGSAPGTSESATPESGPGTSTEPSEGSAPGTSESATPESGPG |
| | SEPATSGSETPGTSTEPSEGSAPGTSTEPSEGSAPGTSESATPESGPGTSESATPESGPGSPAGSP |
| | TSTEEGTSESATPESGPGSEPATSGSETPGTSESATPESGPGTSTEPSEGSAPGTSTEPSEGSAPG |
| | TSTEPSEGSAPGTSTEPSEGSAPGTSTEPSEGSAPGTSTEPSEGSAPGSPAGSPTSTEEGTSTEPSE |
| | GSAPGTSESATPESGPGSEPATSGSETPGTSESATPESGPGSEPATSGSETPGTSESATPESGPGT |
| | STEPSEGSAPGTSESATPESGPGSPAGSPTSTEEGSPAGSPTSTEEGSPAGSPTSTEEGTSESATPE |
| | SGPGTSTEPSEGSAPGTSESATPESGPGSEPATSGSETPGTSESATPESGPGSEPATSGSETPGTS |
| | ESATPESGPGTSTEPSEGSAPGSPAGSPTSTEEGTSESATPESGPGSEPATSGSETPGTSESATPES |
| | GPGSPAGSPTSTEEGSPAGSPTSTEEGTSTEPSEGSAPGTSESATPESGPGTSESATPESGPGTSE |
| | SATPESGPGSEPATSGSETPGSEPATSGSETPGSPAGSPTSTEEGTSTEPSEGSAPGTSTEPSEGS |
| | APGSEPATSGSETPGTSESATPESGPGTSTEPSEGSAPG |
| GLP-2 | HGDGSFSDEMNTILDNLAARDFINWLIQTKITDGGSPAGSPTSTEEGTSTEPSEGSAPGSPAGSP |
| variant 2- | TSTEEGTSESATPESGPGSEPATSGSETPGTSTEPSEGSAPGTSTEPSEGSAPGTSESATPESGPG |
| AE1236 | TSTEPSEGSAPGTSTEPSEGSAPGSEPATSGSETPGSPAGSPTSTEEGTSESATPESGPGSPAGSP |
| | TSTEEGTSTEPSEGSAPGSPAGSPTSTEEGTSTEPSEGSAPGSPAGSPTSTEEGTSTEPSEGSAPG |
| | SPAGSPTSTEEGSPAGSPTSTEEGTSTEPSEGSAPGSEPATSGSETPGSPAGSPTSTEEGTSESATP |
| | ESGPGSEPATSGSETPGSEPATSGSETPGTSESATPESGPGSPAGSPTSTEEGTSESATPESGPGS |
| | EPATSGSETPGSEPATSGSETPGTSESATPESGPGTSESATPESGPGTSTEPSEGSAPGTSTEPSE |
| | GSAPGTSESATPESGPGSPAGSPTSTEEGTSTEPSEGSAPGSEPATSGSETPGSPAGSPTSTEEGT |
| | STEPSEGSAPGTSTEPSEGSAPGSPAGSPTSTEEGSPAGSPTSTEEGSPAGSPTSTEEGTSESATPE |
| | SGPGSEPATSGSETPGTSESATPESGPGTSESATPESGPGTSTEPSEGSAPGTSESATPESGPGSP |
| | AGSPTSTEEGTSESATPESGPGTSESATPESGPGTSTEPSEGSAPGSEPATSGSETPGTSTEPSEG |
| | SAPGSPAGSPTSTEEGTSESATPESGPGTSTEPSEGSAPGTSTEPSEGSAPGSEPATSGSETPGSE |
| | PATSGSETPGTSESATPESGPGSEPATSGSETPGSPAGSPTSTEEGTSESATPESGPGSEPATSGS |
| | ETPGTSTEPSEGSAPGTSESATPESGPGTSESATPESGPGTSTEPSEGSAPGSEPATSGSETPGTS |
| | TEPSEGSAPGSPAGSPTSTEEGSPAGSPTSTEEGTSESATPESGPGSEPATSGSETPGSPAGSPTS |
| | TEEGSPAGSPTSTEEGTSESATPESGPGSEPATSGSETPGTSTEPSEGSAPGTSTEPSEGSAPGSE |
| | P |
| GLP-2 | HGDGSFSDEMNTILDNLAARDFINWLIQTKITDGGSPAGSPTSTEEGTSTEPSEGSAPGTSESAT |
| variant 2- | PESGPGTSESATPESGPGSEPATSGSETPGTSTEPSEGSAPGTSESATPESGPGSPAGSPTSTEEG |
| AE1332 | TSTEPSEGSAPGTSESATPESGPGSPAGSPTSTEEGTSTEPSEGSAPGTSESATPESGPGTSTEPSE |
| | GSAPGSEPATSGSETPGSEPATSGSETPGSEPATSGSETPGTSESATPESGPGSPAGSPTSTEEGT |
| | SESATPESGPGSEPATSGSETPGTSESATPESGPGTSESATPESGPGSPAGSPTSTEEGTSTEPSEG |
| | SAPGTSESATPESGPGTSTEPSEGSAPGTSTEPSEGSAPGTSTEPSEGSAPGSEPATSGSETPGTS |
| | TEPSEGSAPGTSESATPESGPGTSESATPESGPGTSTEPSEGSAPGTSESATPESGPGTSESATPES |
| | GPGSEPATSGSETPGTSTEPSEGSAPGTSESATPESGPGSPAGSPTSTEEGSPAGSPTSTEEGTST |
| | EPSEGSAPGSEPATSGSETPGSEPATSGSETPGTSTEPSEGSAPGSEPATSGSETPGSPAGSPTST |
| | EEGTSESATPESGPGSEPATSGSETPGSEPATSGSETPGTSESATPESGPGTSESATPESGPGTST |
| | EPSEGSAPGSPAGSPTSTEEGTSESATPESGPGTSTEPSEGSAPGSEPATSGSETPGSPAGSPTST |
| | EEGTSTEPSEGSAPGTSTEPSEGSAPGSEPATSGSETPGTSESATPESGPGTSTEPSEGSAPGSPA |
| | GSPTSTEEGTSESATPESGPGTSESATPESGPGTSTEPSEGSAPGSEPATSGSETPGSEPATSGSE |
| | TPGTSTEPSEGSAPGTSESATPESGPGSPAGSPTSTEEGTSTEPSEGSAPGTSTEPSEGSAPGSPA |
| | GSPTSTEEGSPAGSPTSTEEGTSTEPSEGSAPGSEPATSGSETPGSPAGSPTSTEEGTSESATPES |
| | GPGSEPATSGSETPGSEPATSGSETPGTSESATPESGPGTSESATPESGPGTSTEPSEGSAPGTST |
| GLP-2 | HGDGSFSDEMNTILDNLAARDFINWLIQTKITDGGSETPGTSTEPSEGSAPGTSTEPSEGSAPGT |
| variant 2- | SESATPESGPGTSESATPESGPGSPAGSPTSTEEGTSESATPESGPGSEPATSGSETPGTSESATPE |
| AE612A | SGPGTSTEPSEGSAPGTSTEPSEGSAPGTSTEPSEGSAPGTSTEPSEGSAPGTSTEPSEGSAPGTS |
| | TEPSEGSAPGSPAGSPTSTEEGTSTEPSEGSAPGTSESATPESGPGSEPATSGSETPGTSESATPES |
| | GPGSEPATSGSETPGTSESATPESGPGTSTEPSEGSAPGTSESATPESGPGSPAGSPTSTEEGSPA |
| | GSPTSTEEGSPAGSPTSTEEGTSESATPESGPGTSTEPSEGSAPGTSESATPESGPGSEPATSGSE |
| | TPGTSESATPESGPGSEPATSGSETPGTSESATPESGPGTSTEPSEGSAPGSPAGSPTSTEEGTSES |
| | ATPESGPGSEPATSGSETPGTSESATPESGPGSPAGSPTSTEEGSPAGSPTSTEEGTSTEPSEGSA |
| | PGTSESATPESGPGTSESATPESGPGTSESATPESGPGSEPATSGSETPGSEPATSGSETPGSPAG |
| | SPTSTEEGTSTEPSEGSAPGTSTEPSEGSAPGSEPATSGSETPGTSESAT |
| GLP-2 | HGDGSFSDEMNTILDNLAARDFINWLIQTKITDGTSGSETPGSEPATSGSETPGSPAGSPTSTEE |
| variant 2- | GTSESATPESGPGTSTEPSEGSAPGTSTEPSEGSAPGSPAGSPTSTEEGTSTEPSEGSAPGTSTEPS |
| AE720A | EGSAPGTSESATPESGPGTSTEPSEGSAPGTSESATPESGPGSEPATSGSETPGTSTEPSEGSAPG |
| | TSTEPSEGSAPGTSESATPESGPGTSESATPESGPGSPAGSPTSTEEGTSESATPESGPGSEPATS |
| | GSETPGTSESATPESGPGTSTEPSEGSAPGTSTEPSEGSAPGTSTEPSEGSAPGTSTEPSEGSAPG |
| | TSTEPSEGSAPGTSTEPSEGSAPGSPAGSPTSTEEGTSTEPSEGSAPGTSESATPESGPGSEPATS |
| | GSETPGTSESATPESGPGSEPATSGSETPGTSESATPESGPGTSTEPSEGSAPGTSESATPESGPG |
| | SPAGSPTSTEEGSPAGSPTSTEEGSPAGSPTSTEEGTSESATPESGPGTSTEPSEGSAPGTSESATP |
| | ESGPGSEPATSGSETPGTSESATPESGPGSEPATSGSETPGTSESATPESGPGTSTEPSEGSAPGS |
| | PAGSPTSTEEGTSESATPESGPGSEPATSGSETPGTSESATPESGPGSPAGSPTSTEEGSPAGSPT |
| | STEEGTSTEPSEGSAPGTSESATPESGPGTSESATPESGPGTSESATPESGPGSEPATSGSETPGS |
| | EPATSGSETPGSPAGSPTSTEEGTSTE |
| GLP-2 | HGDGSFSDEMNTILDNLAARDFINWLIQTKITDGSTGSPGTPGSGTASSSPGSSTPSGATGSPG |
| variant 2- | ASPGTSSTGSPGTPGSGTASSSPGSSTPSGATGSPGSSPSASTGTGPGSSPSASTGTGPGSSTPSG |
| AG612A | ATGSPGSSTPSGATGSPGASPGTSSTGSPGASPGTSSTGSPGASPGTSSTGSPGTPGSGTASSSPG |
| | ASPGTSSTGSPGASPGTSSTGSPGASPGTSSTGSPGSSPSASTGTGPGTPGSGTASSSPGASPGTS |
| | STGSPGASPGTSSTGSPGASPGTSSTGSPGSSTPSGATGSPGSSTPSGATGSPGASPGTSSTGSPG |
| | TPGSGTASSSPGSSTPSGATGSPGSSTPSGATGSPGSSTPSGATGSPGSSPSASTGTGPGASPGTS |
| | STGSPGASPGTSSTGSPGTPGSGTASSSPGASPGTSSTGSPGASPGTSSTGSPGASPGTSSTGSPG |
| | ASPGTSSTGSPGTPGSGTASSSPGSSTPSGATGSPGTPGSGTASSSPGSSTPSGATGSPGTPGSGT |
| | ASSSPGSSTPSGATGSPGSSTPSGATGSPGSSPSASTGTGPGSSPSASTGTGPGASPGTSSTGSPG |
| | TPGSGTASSSPGSSTPSGATGSPGSSPSASTGTGPGSSPSASTGTGPGASPGTS |
| GLP-2 | HGDGSFSDEMNTILDNLAARDFINWLIQTKITDGTSSTGSPGSSPSASTGTGPGSSPSASTGTGP |
| variant 2- | GTPGSGTASSSPGSSTPSGATGSPGSSPSASTGTGPGASPGTSSTGSPGTPGSGTASSSPGSSTPS |
| AG792A | GATGSPGTPGSGTASSSPGASPGTSSTGSPGASPGTSSTGSPGTPGSGTASSSPGSSTPSGATGSP |
| | GASPGTSSTGSPGTPGSGTASSSPGSSTPSGATGSPGSSPSASTGTGPGSSPSASTGTGPGSSTPS |
| | GATGSPGSSTPSGATGSPGASPGTSSTGSPGASPGTSSTGSPGASPGTSSTGSPGTPGSGTASSSP |
| | GASPGTSSTGSPGASPGTSSTGSPGASPGTSSTGSPGSSPSASTGTGPGTPGSGTASSSPGASPGT |
| | SSTGSPGASPGTSSTGSPGASPGTSSTGSPGSSTPSGATGSPGSSTPSGATGSPGASPGTSSTGSP |
| | GTPGSGTASSSPGSSTPSGATGSPGSSTPSGATGSPGSSTPSGATGSPGSSPSASTGTGPGASPGT |
| | SSTGSPGASPGTSSTGSPGTPGSGTASSSPGASPGTSSTGSPGASPGTSSTGSPGASPGTSSTGSP |
| | GASPGTSSTGSPGTPGSGTASSSPGSSTPSGATGSPGTPGSGTASSSPGSSTPSGATGSPGTPGSG |
| | TASSSPGSSTPSGATGSPGSSTPSGATGSPGSSPSASTGTGPGSSPSASTGTGPGASPGTSSTGSP |
| | GTPGSGTASSSPGSSTPSGATGSPGSSPSASTGTGPGSSPSASTGTGPGASPGTSSTGSPGASPGT |
| | SSTGSPGSSTPSGATGSPGSSPSASTGTGPGASPG |

*Sequence name reflects N- to C-terminus configuration of the GLP-2 and XTEN (by family name and length)

TABLE 34
Exemplary GLP2-XTEN comprising GLP-2, cleavage sequences and XTEN sequences
(SEQ ID NOS 775-786, respectively, in order of appearance)

| GLP2- | |
|---|---|
| XTEN | |
| Name* | Amino Acid Sequence |
| GLP2- | HADGSFSDEMNTILDNLAARDFINWLIQTKITDGLTPRSLLVGGGGSSESGSSEGGPGSSESGS |
| Thrombin- | SEGGPGESPGGSSGSESGSGGEPSESGSSGESPGGSSGSESGESPGGSSGSESGSSESGSSEGGPG |
| AD836 | SSESGSSEGGPGSSESGSSEGGPGESPGGSSGSESGESPGGSSGSESGESPGGSSGSESGSSESGS |
| | SEGGPGSSESGSSEGGPGSSESGSSEGGPGSSESGSSEGGPGSSESGSSEGGPGSSESGSSEGGPG |
| | SGGEPSESGSSGESPGGSSGSESGESPGGSSGSESGSGGEPSESGSSGSEGSSGPGESSGSSESGS |
| | SEGGPGSGGEPSESGSSGSEGSSGPGESSGSSESGSSEGGPGSGGEPSESGSSGESPGGSSGSESG |
| | SGGEPSESGSSGSGGEPSESGSSGSSESGSSEGGPGSGGEPSESGSSGSGGEPSESGSSGSEGSSG |
| | PGESSGESPGGSSGSESGSEGSSGPGESSGSEGSSGPGESSGSGGEPSESGSSGSSESGSSEGGPG |
| | SSESGSSEGGPGESPGGSSGSESGSGGEPSESGSSGSEGSSGPGESSGESPGGSSGSESGSEGSSG |
| | PGSSESGSSEGGPGSGGEPSESGSSGSEGSSGPGESSGSEGSSGPGESSGSEGSSGPGESSGSGGE |
| | PSESGSSGSGGEPSESGSSGESPGGSSGSESGESPGGSSGSESGSGGEPSESGSSGSEGSSGPGES |
| | SGESPGGSSGSESGSSESGSSEGGPGSSESGSSEGGPGSSESGSSEGGPGSGGEPSESGSSGSSES |
| | GSSEGGPGESPGGSSGSESGSGGEPSESGSSGSSESGSSEGGPGESPGGSSGSESGSGGEPSESGS |
| | SGESPGGSSGSESGSGGEPSESGSS |
| GLP2- | HADGSFSDEMNTILDNLAARDFINWLIQTKITDGGGKLTRVVGGGGSPAGSPTSTEEGTSESA |
| FXIa- | TPESGPGTSTEPSEGSAPGSPAGSPTSTEEGTSTEPSEGSAPGTSTEPSEGSAPGTSESATPESGP |
| AE864 | GSEPATSGSETPGSEPATSGSETPGSPAGSPTSTEEGTSESATPESGPGTSTEPSEGSAPGTSTEPS |
| | EGSAPGSPAGSPTSTEEGTSTEPSEGSAPGTSTEPSEGSAPGTSESATPESGPGTSTEPSEGSAPG |
| | TSESATPESGPGSEPATSGSETPGTSTEPSEGSAPGTSTEPSEGSAPGTSESATPESGPGTSESATP |
| | ESGPGSPAGSPTSTEEGTSESATPESGPGSEPATSGSETPGTSESATPESGPGTSTEPSEGSAPGT |
| | STEPSEGSAPGTSTEPSEGSAPGTSTEPSEGSAPGTSTEPSEGSAPGTSTEPSEGSAPGSPAGSPTS |
| | TEEGTSTEPSEGSAPGTSESATPESGPGSEPATSGSETPGTSESATPESGPGSEPATSGSETPGTS |
| | ESATPESGPGTSTEPSEGSAPGTSESATPESGPGSPAGSPTSTEEGSPAGSPTSTEEGSPAGSPTS |
| | TEEGTSESATPESGPGTSTEPSEGSAPGTSESATPESGPGSEPATSGSETPGTSESATPESGPGSE |
| | PATSGSETPGTSESATPESGPGTSTEPSEGSAPGSPAGSPTSTEEGTSESATPESGPGSEPATSGS |
| | ETPGTSESATPESGPGSPAGSPTSTEEGSPAGSPTSTEEGTSTEPSEGSAPGTSESATPESGPGTS |
| | ESATPESGPGTSESATPESGPGSEPATSGSETPGSEPATSGSETPGSPAGSPTSTEEGTSTEPSEGS |
| | APGTSTEPSEGSAPGSEPATSGSETPGTSESATPESGPGTSTEPSEGSAPG |
| GLP2- | HADGSFSDEMNTILDNLAARDFINWLIQTKITDGGGLGPVSGVPGGSTSESPSGTAPGTSPSGE |
| Elastase- | SSTAPGSTSESPSGTAPGSTSESPSGTAPGTSTPESGSASPGTSTPESGSASPGSTSESPSGTAPGS |
| AF864 | TSESPSGTAPGTSPSGESSTAPGSTSESPSGTAPGTSPSGESSTAPGTSPSGESSTAPGSTSSTAES |
| | PGPGTSPSGESSTAPGTSPSGESSTAPGSTSSTAESPGPGTSTPESGSASPGTSTPESGSASPGSTS |
| | ESPSGTAPGSTSESPSGTAPGTSTPESGSASPGSTSSTAESPGPGTSTPESGSASPGSTSESPSGTA |
| | PGTSPSGESSTAPGSTSSTAESPGPGTSPSGESSTAPGTSTPESGSASPGSTSSTAESPGPGSTSST |
| | AESPGPGSTSSTAESPGPGSTSSTAESPGPGTSPSGESSTAPGSTSESPSGTAPGSTSESPSGTAPG |
| | TSTPESGPXXXGASASGAPSTXXXXSESPSGTAPGSTSESPSGTAPGSTSESPSGTAPGSTSESPS |
| | GTAPGSTSESPSGTAPGSTSESPSGTAPGTSTPESGSASPGTSPSGESSTAPGTSPSGESSTAPGST |
| | SSTAESPGPGTSPSGESSTAPGTSTPESGSASPGSTSESPSGTAPGSTSESPSGTAPGTSPSGESST |
| | APGSTSESPSGTAPGTSTPESGSASPGTSTPESGSASPGSTSESPSGTAPGTSTPESGSASPGSTSS |
| | TAESPGPGSTSESPSGTAPGSTSESPSGTAPGTSPSGESSTAPGSTSSTAESPGPGTSPSGESSTAP |
| | GTSTPESGSASPGTSPSGESSTAPGTSPSGESSTAPGTSPSGESSTAPGSTSSTAESPGPGSTSSTA |
| | ESPGPGTSPSGESSTAPGSSPSASTGTGPGSSTPSGATGSPGSSTPSGATGSP |
| GLP2- | HADGSFSDEMNTILDNLAARDFINWLIQTKITDGAPLGLRLRGGGGASPGTSSTGSPGSSPSAS |
| MMP-17- | TGTGPGSSPSASTGTGPGTPGSGTASSSPGSSTPSGATGSPGSNPSASTGTGPGASPGTSSTGSP |
| AG864 | GTPGSGTASSSPGSSTPSGATGSPGTPGSGTASSSPGASPGTSSTGSPGASPGTSSTGSPGTPGSG |
| | TASSSPGSSTPSGATGSPGASPGTSSTGSPGTPGSGTASSSPGSSTPSGATGSPGSNPSASTGTGP |
| | GSSPSASTGTGPGSSTPSGATGSPGSSTPSGATGSPGASPGTSSTGSPGASPGTSSTGSPGASPGT |
| | SSTGSPGTPGSGTASSSPGASPGTSSTGSPGASPGTSSTGSPGASPGTSSTGSPGSSPSASTGTGP |
| | GTPGSGTASSSPGASPGTSSTGSPGASPGTSSTGSPGASPGTSSTGSPGSSTPSGATGSPGSSTPS |
| | GATGSPGASPGTSSTGSPGTPGSGTASSSPGSSTPSGATGSPGSSTPSGATGSPGSSTPSGATGSP |
| | GSSPSASTGTGPGASPGTSSTGSPGASPGTSSTGSPGTPGSGTASSSPGASPGTSSTGSPGASPGT |
| | SSTGSPGASPGTSSTGSPGASPGTSSTGSPGTPGSGTASSSPGSSTPSGATGSPGTPGSGTASSSP |
| | GSSTPSGATGSPGTPGSGTASSSPGSSTPSGATGSPGSSTPSGATGSPGSSPSASTGTGPGSSPSA |
| | STGTGPGASPGTSSTGSPGTPGSGTASSSPGSSTPSGATGSPGSSPSASTGTGPGSSPSASTGTGP |
| | GASPGTSSTGSPGASPGTSSTGSPGSSTPSGATGSPGSSPSASTGTGPGASPGTSSTGSPGSSPSA |
| | STGTGPGTPGSGTASSSPGSSTPSGATGSPGSSTPSGATGSPGASPGTSSTGSP |
| GLP-2 | HGDGSFSDEMNTILDNLAARDFINWLIQTKITDGLTPRSLLVGGGGSSESGSSEGGPGSSESGS |
| variant 2- | SEGGPGESPGGSSGSESGSGGEPSESGSSGESPGGSSGSESGESPGGSSGSESGSSESGSSEGGPG |
| Thrombin- | SSESGSSEGGPGSSESGSSEGGPGESPGGSSGSESGESPGGSSGSESGESPGGSSGSESGSSESGS |
| AD836 | SEGGPGSSESGSSEGGPGSSESGSSEGGPGSSESGSSEGGPGSSESGSSEGGPGSSESGSSEGGPG |
| | SGGEPSESGSSGESPGGSSGSESGESPGGSSGSESGSGGEPSESGSSGSEGSSGPGESSGSSESGS |
| | SEGGPGSGGEPSESGSSGSEGSSGPGESSGSSESGSSEGGPGSGGEPSESGSSGESPGGSSGSESG |
| | SGGEPSESGSSGSGGEPSESGSSGSSESGSSEGGPGSGGEPSESGSSGSGGEPSESGSSGSEGSSG |
| | PGESSGESPGGSSGSESGSEGSSGPGESSGSEGSSGPGESSGSGGEPSESGSSGSSESGSSEGGPG |
| | SSESGSSEGGPGESPGGSSGSESGSGGEPSESGSSGSEGSSGPGESSGESPGGSSGSESGSEGSSG |
| | PGSSESGSSEGGPGSGGEPSESGSSGSEGSSGPGESSGSEGSSGPGESSGSEGSSGPGESSGSGGE |
| | PSESGSSGSGGEPSESGSSGESPGGSSGSESGESPGGSSGSESGSGGEPSESGSSGSEGSSGPGES |
| | SGESPGGSSGSESGSSESGSSEGGPGSSESGSSEGGPGSSESGSSEGGPGSGGEPSESGSSGSSES |
| | GSSEGGPGESPGGSSGSESGSGGEPSESGSSGSSESGSSEGGPGESPGGSSGSESGSGGEPSESGS |
| | SGESPGGSSGSESGSGGEPSESGSS |
| GLP-2 | HGDGSFSDEMNTILDNLAARDFINWLIQTKITDGGGKLTRVVGGGGSPAGSPTSTEEGTSESA |
| variant 2- | TPESGPGTSTEPSEGSAPGSPAGSPTSTEEGTSTEPSEGSAPGTSTEPSEGSAPGTSESATPESGP |
| FXIa- | GSEPATSGSETPGSEPATSGSETPGSPAGSPTSTEEGTSESATPESGPGTSTEPSEGSAPGTSTEPS |
| AE864 | EGSAPGSPAGSPTSTEEGTSTEPSEGSAPGTSTEPSEGSAPGTSESATPESGPGTSTEPSEGSAPG |
| | TSESATPESGPGSEPATSGSETPGTSTEPSEGSAPGTSTEPSEGSAPGTSESATPESGPGTSESATP |
| | ESGPGSPAGSPTSTEEGTSESATPESGPGSEPATSGSETPGTSESATPESGPGTSTEPSEGSAPGT |
| | STEPSEGSAPGTSTEPSEGSAPGTSTEPSEGSAPGTSTEPSEGSAPGTSTEPSEGSAPGSPAGSPTS |
| | TEEGTSTEPSEGSAPGTSESATPESGPGSEPATSGSETPGTSESATPESGPGSEPATSGSETPGTS |
| | ESATPESGPGTSTEPSEGSAPGTSESATPESGPGSPAGSPTSTEEGSPAGSPTSTEEGSPAGSPTS |
| | TEEGTSESATPESGPGTSTEPSEGSAPGTSESATPESGPGSEPATSGSETPGTSESATPESGPGSE |
| | PATSGSETPGTSESATPESGPGTSTEPSEGSAPGSPAGSPTSTEEGTSESATPESGPGSEPATSGS |
| | ETPGTSESATPESGPGSPAGSPTSTEEGSPAGSPTSTEEGTSTEPSEGSAPGTSESATPESGPGTS |
| | ESATPESGPGTSESATPESGPGSEPATSGSETPGSEPATSGSETPGSPAGSPTSTEEGTSTEPSEGS |
| | APGTSTEPSEGSAPGSEPATSGSETPGTSESATPESGPGTSTEPSEGSAPG |
| GLP-2 | HGDGSFSDEMNTILDNLAARDFINWLIQTKITDGGGLGPVSGVPGGSTSESPSGTAPGTSPSGE |
| variant 2- | SSTAPGSTSESPSGTAPGSTSESPSGTAPGTSTPESGSASPGTSTPESGSASPGSTSESPSGTAPGS |
| Elastase- | TSESPSGTAPGTSPSGESSTAPGSTSESPSGTAPGTSPSGESSTAPGTSPSGESSTAPGSTSSTAES |
| AF864 | PGPGTSPSGESSTAPGTSPSGESSTAPGSTSSTAESPGPGTSTPESGSASPGTSTPESGSASPGSTS |
| | ESPSGTAPGSTSESPSGTAPGTSTPESGSASPGSTSSTAESPGPGTSTPESGSASPGSTSESPSGTA |
| | PGTSPSGESSTAPGSTSSTAESPGPGTSPSGESSTAPGTSTPESGSASPGSTSSTAESPGPGSTSST |
| | AESPGPGSTSSTAESPGPGSTSSTAESPGPGTSPSGESSTAPGSTSESPSGTAPGSTSESPSGTAPG |
| | TSTPESGPXXXGASASGAPSTXXXXSESPSGTAPGSTSESPSGTAPGSTSESPSGTAPGSTSESPS |
| | GTAPGSTSESPSGTAPGSTSESPSGTAPGTSTPESGSASPGTSPSGESSTAPGTSPSGESSTAPGST |
| | SSTAESPGPGTSPSGESSTAPGTSTPESGSASPGSTSESPSGTAPGSTSESPSGTAPGTSPSGESST |
| | APGSTSESPSGTAPGTSTPESGSASPGTSTPESGSASPGSTSESPSGTAPGTSTPESGSASPGSTSS |
| | TAESPGPGSTSESPSGTAPGSTSESPSGTAPGTSPSGESSTAPGSTSSTAESPGPGTSPSGESSTAP |
| | GTSTPESGSASPGTSPSGESSTAPGTSPSGESSTAPGTSPSGESSTAPGSTSSTAESPGPGSTSSTA |
| | ESPGPGTSPSGESSTAPGSSPSASTGTGPGSSTPSGATGSPGSSTPSGATGSP |
| GLP-2 | HGDGSFSDEMNTILDNLAARDFINWLIQTKITDGAPLGLRLRGGGGASPGTSSTGSPGSSPSAS |
| variant 2- | TGTGPGSSPSASTGTGPGTPGSGTASSSPGSSTPSGATGSPGSNPSASTGTGPGASPGTSSTGSP |
| MMP-17- | GTPGSGTASSSPGSSTPSGATGSPGTPGSGTASSSPGASPGTSSTGSPGASPGTSSTGSPGTPGSG |
| AG864 | TASSSPGSSTPSGATGSPGASPGTSSTGSPGTPGSGTASSSPGSSTPSGATGSPGSNPSASTGTGP |
| | GSSPSASTGTGPGSSTPSGATGSPGSSTPSGATGSPGASPGTSSTGSPGASPGTSSTGSPGASPGT |
| | SSTGSPGTPGSGTASSSPGASPGTSSTGSPGASPGTSSTGSPGASPGTSSTGSPGSSPSASTGTGP |
| | GTPGSGTASSSPGASPGTSSTGSPGASPGTSSTGSPGASPGTSSTGSPGSSTPSGATGSPGSSTPS |
| | GATGSPGASPGTSSTGSPGTPGSGTASSSPGSSTPSGATGSPGSSTPSGATGSPGSSTPSGATGSP |
| | GSSPSASTGTGPGASPGTSSTGSPGASPGTSSTGSPGTPGSGTASSSPGASPGTSSTGSPGASPGT |
| | SSTGSPGASPGTSSTGSPGASPGTSSTGSPGTPGSGTASSSPGSSTPSGATGSPGTPGSGTASSSP |
| | GSSTPSGATGSPGTPGSGTASSSPGSSTPSGATGSPGSSTPSGATGSPGSSPSASTGTGPGSSPSA |
| | STGTGPGASPGTSSTGSPGTPGSGTASSSPGSSTPSGATGSPGSSPSASTGTGPGSSPSASTGTGP |
| | GASPGTSSTGSPGASPGTSSTGSPGSSTPSGATGSPGSSPSASTGTGPGASPGTSSTGSPGSSPSA |
| | STGTGPGTPGSGTASSSPGSSTPSGATGSPGSSTPSGATGSPGASPGTSSTGSP |
| AE912- | MAEPAGSPTSTEEGTPGSGTASSSPGSSTPSGATGSPGASPGTSSTGSPGSPAGSPTSTEEGTSES |
| Thrombin- | ATPESGPGTSTEPSEGSAPGSPAGSPTSTEEGTSTEPSEGSAPGTSTEPSEGSAPGTSESATPESG |
| GLP2 | PGSEPATSGSETPGSEPATSGSETPGSPAGSPTSTEEGTSESATPESGPGTSTEPSEGSAPGTSTEP |
| | SEGSAPGSPAGSPTSTEEGTSTEPSEGSAPGTSTEPSEGSAPGTSESATPESGPGTSTEPSEGSAP |
| | GTSESATPESGPGSEPATSGSETPGTSTEPSEGSAPGTSTEPSEGSAPGTSESATPESGPGTSESA |
| | TPESGPGSPAGSPTSTEEGTSESATPESGPGSEPATSGSETPGTSESATPESGPGTSTEPSEGSAP |
| | GTSTEPSEGSAPGTSTEPSEGSAPGTSTEPSEGSAPGTSTEPSEGSAPGTSTEPSEGSAPGSPAGS |
| | PTSTEEGTSTEPSEGSAPGTSESATPESGPGSEPATSGSETPGTSESATPESGPGSEPATSGSETP |
| | GTSESATPESGPGTSTEPSEGSAPGTSESATPESGPGSPAGSPTSTEEGSPAGSPTSTEEGSPAGS |
| | PTSTEEGTSESATPESGPGTSTEPSEGSAPGTSESATPESGPGSEPATSGSETPGTSESATPESGP |
| | GSEPATSGSETPGTSESATPESGPGTSTEPSEGSAPGSPAGSPTSTEEGTSESATPESGPGSEPAT |
| | SGSETPGTSESATPESGPGSPAGSPTSTEEGSPAGSPTSTEEGTSTEPSEGSAPGTSESATPESGP |
| | GTSESATPESGPGTSESATPESGPGSEPATSGSETPGSEPATSGSETPGSPAGSPTSTEEGTSTEPS |
| | EGSAPGTSTEPSEGSAPGSEPATSGSETPGTSESATPESGPGTSTEPSEGSAPGLTPRSLLVGGG |
| | HADGSFSDEMNTILDNLAARDFINWLIQTKITD |
| AE912- | MAEPAGSPTSTEEGTPGSGTASSSPGSSTPSGATGSPGASPGTSSTGSPGSPAGSPTSTEEGTSES |
| FXIa-GLP-2 | ATPESGPGTSTEPSEGSAPGSPAGSPTSTEEGTSTEPSEGSAPGTSTEPSEGSAPGTSESATPESG |
| variant 2 | PGSEPATSGSETPGSEPATSGSETPGSPAGSPTSTEEGTSESATPESGPGTSTEPSEGSAPGTSTEP |
| | SEGSAPGSPAGSPTSTEEGTSTEPSEGSAPGTSTEPSEGSAPGTSESATPESGPGTSTEPSEGSAP |
| | GTSESATPESGPGSEPATSGSETPGTSTEPSEGSAPGTSTEPSEGSAPGTSESATPESGPGTSESA |
| | TPESGPGSPAGSPTSTEEGTSESATPESGPGSEPATSGSETPGTSESATPESGPGTSTEPSEGSAP |
| | GTSTEPSEGSAPGTSTEPSEGSAPGTSTEPSEGSAPGTSTEPSEGSAPGTSTEPSEGSAPGSPAGS |
| | PTSTEEGTSTEPSEGSAPGTSESATPESGPGSEPATSGSETPGTSESATPESGPGSEPATSGSETP |
| | GTSESATPESGPGTSTEPSEGSAPGTSESATPESGPGSPAGSPTSTEEGSPAGSPTSTEEGSPAGS |
| | PTSTEEGTSESATPESGPGTSTEPSEGSAPGTSESATPESGPGSEPATSGSETPGTSESATPESGP |
| | GSEPATSGSETPGTSESATPESGPGTSTEPSEGSAPGSPAGSPTSTEEGTSESATPESGPGSEPAT |
| | SGSETPGTSESATPESGPGSPAGSPTSTEEGSPAGSPTSTEEGTSTEPSEGSAPGTSESATPESGP |
| | GTSESATPESGPGTSESATPESGPGSEPATSGSETPGSEPATSGSETPGSPAGSPTSTEEGTSTEPS |
| | EGSAPGTSTEPSEGSAPGSEPATSGSETPGTSESATPESGPGTSTEPSEGSAPGGGKLTRVVGGG |
| | HGDGSFSDEMNTILDNLAARDFINWLIQTKITD |
| AE912- | MAEPAGSPTSTEEGTPGSGTASSSPGSSTPSGATGSPGASPGTSSTGSPGSPAGSPTSTEEGTSES |
| Elastase- | ATPESGPGTSTEPSEGSAPGSPAGSPTSTEEGTSTEPSEGSAPGTSTEPSEGSAPGTSESATPESG |
| GLP-2 | PGSEPATSGSETPGSEPATSGSETPGSPAGSPTSTEEGTSESATPESGPGTSTEPSEGSAPGTSTEP |
| variant 2 | SEGSAPGSPAGSPTSTEEGTSTEPSEGSAPGTSTEPSEGSAPGTSESATPESGPGTSTEPSEGSAP |
| | GTSESATPESGPGSEPATSGSETPGTSTEPSEGSAPGTSTEPSEGSAPGTSESATPESGPGTSESA |
| | TPESGPGSPAGSPTSTEEGTSESATPESGPGSEPATSGSETPGTSESATPESGPGTSTEPSEGSAP |
| | GTSTEPSEGSAPGTSTEPSEGSAPGTSTEPSEGSAPGTSTEPSEGSAPGTSTEPSEGSAPGSPAGS |
| | PTSTEEGTSTEPSEGSAPGTSESATPESGPGSEPATSGSETPGTSESATPESGPGSEPATSGSETP |
| | GTSESATPESGPGTSTEPSEGSAPGTSESATPESGPGSPAGSPTSTEEGSPAGSPTSTEEGSPAGS |
| | PTSTEEGTSESATPESGPGTSTEPSEGSAPGTSESATPESGPGSEPATSGSETPGTSESATPESGP |
| | GSEPATSGSETPGTSESATPESGPGTSTEPSEGSAPGSPAGSPTSTEEGTSESATPESGPGSEPAT |
| | SGSETPGTSESATPESGPGSPAGSPTSTEEGSPAGSPTSTEEGTSTEPSEGSAPGTSESATPESGP |
| | GTSESATPESGPGTSESATPESGPGSEPATSGSETPGSEPATSGSETPGSPAGSPTSTEEGTSTEPS |
| | EGSAPGTSTEPSEGSAPGSEPATSGSETPGTSESATPESGPGTSTEPSEGSAPGGGLGPVSGVPG |
| | HGDGSFSDEMNTILDNLAARDFINWLIQTKITD |
| GLP-2 | HGDGSFSDEMNTILDNLAARDFINWLIQTKITDGAPLGLRLRGGGGSPAGSPTSTEEGTSESAT |
| variant 2- | PESGPGTSTEPSEGSAPGSPAGSPTSTEEGTSTEPSEGSAPGTSTEPSEGSAPGTSESATPESGPG |
| MMP-17- | SEPATSGSETPGSEPATSGSETPGSPAGSPTSTEEGTSESATPESGPGTSTEPSEGSAPGTSTEPSE |
| AE864 | GSAPGSPAGSPTSTEEGTSTEPSEGSAPGTSTEPSEGSAPGTSESATPESGPGTSTEPSEGSAPGT |
| | SESATPESGPGSEPATSGSETPGTSTEPSEGSAPGTSTEPSEGSAPGTSESATPESGPGTSESATPE |
| | SGPGSPAGSPTSTEEGTSESATPESGPGSEPATSGSETPGTSESATPESGPGTSTEPSEGSAPGTS |
| | TEPSEGSAPGTSTEPSEGSAPGTSTEPSEGSAPGTSTEPSEGSAPGTSTEPSEGSAPGSPAGSPTS |
| | TEEGTSTEPSEGSAPGTSESATPESGPGSEPATSGSETPGTSESATPESGPGSEPATSGSETPGTS |
| | ESATPESGPGTSTEPSEGSAPGTSESATPESGPGSPAGSPTSTEEGSPAGSPTSTEEGSPAGSPTS |
| | TEEGTSESATPESGPGTSTEPSEGSAPGTSESATPESGPGSEPATSGSETPGTSESATPESGPGSE |
| | PATSGSETPGTSESATPESGPGTSTEPSEGSAPGSPAGSPTSTEEGTSESATPESGPGSEPATSGS |
| | ETPGTSESATPESGPGSPAGSPTSTEEGSPAGSPTSTEEGTSTEPSEGSAPGTSESATPESGPGTS |
| | ESATPESGPGTSESATPESGPGSEPATSGSETPGSEPATSGSETPGSPAGSPTSTEEGTSTEPSEGS |
| | APGTSTEPSEGSAPGSEPATSGSETPGTSESATPESGPGTSTEPSEGSAPG |

*Sequence name reflects N- to C-terminus configuration of the GLP-2, XTEN (by family name and length) and cleavage sequence denoted by protease name active on the sequence.

1. A recombinant fusion protein comprising a glucagon-like protein-2 (GLP-2) sequence HGDGSFSDEMNTILDNLAARDFINWLIQTKITD (SEQ ID NO: 1) and an extended recombinant polypeptide (XTEN), wherein the XTEN is the AE864 sequence (SEQ ID NO: 96) wherein said fusion protein exhibits an apparent molecular weight factor of at least about 4 and exhibits an intestinotrophic effect when administered to a subject using a therapeutically effective amount.

2. The recombinant fusion protein of claim 1, wherein the intestinotrophic effect is at least 100% of the intestinotrophic effect compared to the corresponding GLP-2 not linked to XTEN upon administration of said corresponding GLP-2 to a subject using comparable dose.

3. The recombinant fusion protein of claim 1, wherein the subject is selected from the group consisting of mouse, rat, monkey, and human.

4. The recombinant fusion protein of claim 1, wherein said administration is subcutaneous, intramuscular, or intravenous.

5. The recombinant fusion protein of claim 1, wherein the intestinotrophic effect is determined after administration of at least 1 dose of the fusion protein.

6. The recombinant fusion protein of claim 1, wherein the intestinotrophic effect is selected from the group consisting of intestinal growth, increased hyperplasia of the villus epithelium, increased crypt cell proliferation, increased height of the crypt and villus axis, increased healing after intestinal anastomosis, increased small bowel weight, increased small bowel length, decreased small bowel epithelium apoptosis, and enhancement of intestinal function.

7. The recombinant fusion protein of claim 6, wherein the administration results in an increase in small intestine weight of at least 10%.

8. The recombinant fusion protein of claim 6, wherein the administration results in an increase in small intestine length of at least 5%.

9. The recombinant fusion protein of claim 1, wherein the GLP-2 comprises human GLP-2.

10. The recombinant fusion protein of claim 1, wherein the GLP-2 is selected from the group consisting of bovine GLP-2, pig GLP-2, sheep GLP-2, chicken GLP-2, and canine GLP-2.

11. The recombinant fusion protein of claim 1, wherein the XTEN is linked to the C-terminus of the GLP-2.

12. The recombinant fusion protein of claim 1, wherein the fusion protein sequence has a sequence with at least 90% sequence identity to SEQ ID NO: 798.

13. The recombinant fusion protein of claim 1, wherein the fusion protein exhibits a terminal half-life that is at least 30 hours when administered to a subject.

14. The recombinant fusion protein of claim 1, wherein the administration results in an increase in small intestine weight of at least 10% greater compared to that of the corresponding GLP-2 not linked to XTEN.

15. The recombinant fusion protein of claim 1, wherein the administration results in an increase in small intestine length of at least 5% greater compared to that of the corresponding GLP-2 not linked to XTEN.

16. A pharmaceutical composition comprising the fusion protein of claim 1, and a pharmaceutically acceptable carrier.

17. An isolated nucleic acid comprising:
(a) a nucleic acid sequence that has at least 70%, or at least about 80%, or at least about 90%, or at least about 91%, or at least about 92%, or at least about 93%, or at least about 94%, or at least about 95%, or at least about 96%, or at least about 97%, or at least about 98%, or at least about 99%, or 100% sequence identity to a DNA sequence selected from Table 13, or the complement thereof; or
(b) a nucleotide sequence encoding the fusion protein of claim 1, or the complement thereof.

18. An expression vector or isolated host cell comprising the nucleic acid of claim 17.

19. A host cell comprising the expression vector of claim 18.

20. A method of increasing small intestine length in a subject, the method comprising administering to the subject a recombinant fusion protein, the recombinant fusion protein including a glucagon-like protein-2 (GLP-2) sequence having SEQ ID NO: 1 and an extended recombinant polypeptide (XTEN) having SEQ ID NO: 96.

The application's sequence listing, which the Patent Office published only in electronic form, follows.

SEQUENCE LISTING (798 sequences)

SEQ ID NO: 1 - protein, 33 aa, Artificial Sequence
  Description of Artificial Sequence: Synthetic peptide
HGDGSFSDEMNTILDNLAARDFINWLIQTKITD

SEQ ID NO: 2 - protein, 33 aa, Homo sapiens
HADGSFSDEMNTILDNLAARDFINWLIQTKITD

SEQ ID NO: 3 - protein, 33 aa, Artificial Sequence
  Description of Artificial Sequence: Synthetic peptide
HADGSFSDEMNTILDNLATRDFINWLIQTKITD

SEQ ID NO: 4 - protein, 33 aa, Artificial Sequence
  Description of Artificial Sequence: Synthetic peptide
HVDGSFSDEMNTILDNLAARDFINWLIQTKITD

SEQ ID NO: 5 - protein, 33 aa, Artificial Sequence
  Description of Artificial Sequence: Synthetic peptide
HEDGSFSDEMNTILDNLAARDFINWLIQTKITD

SEQ ID NO: 6 - protein, 33 aa, Artificial Sequence
  Description of Artificial Sequence: Synthetic peptide
HKDGSFSDEMNTILDNLAARDFINWLIQTKITD

SEQ ID NO: 7 - protein, 33 aa, Artificial Sequence
  Description of Artificial Sequence: Synthetic peptide
HRDGSFSDEMNTILDNLAARDFINWLIQTKITD

SEQ ID NO: 8 - protein, 33 aa, Artificial Sequence
  Description of Artificial Sequence: Synthetic peptide
HLDGSFSDEMNTILDNLAARDFINWLIQTKITD

SEQ ID NO: 9 - protein, 33 aa, Artificial Sequence
  Description of Artificial Sequence: Synthetic peptide
HIDGSFSDEMNTILDNLAARDFINWLIQTKITD

SEQ ID NO: 10 - protein, 33 aa, Mus sp.
HADGSFSDEMSTILDNLATRDFINWLIQTKITD

SEQ ID NO: 11 - protein, 33 aa, Rattus sp.; identical to SEQ ID NO: 3

SEQ ID NO: 12 - protein, 33 aa, Bos sp.
HADGSFSDEMNTVLDSLATRDFINWLLQTKITD

SEQ ID NO: 13 - protein, 33 aa, Bos sp.
HGDGSFSDEMNTVLDSLATRDFINWLLQTKITD

SEQ ID NO: 14 - protein, 35 aa, Sus sp.
HADGSFSDEMNTVLDNLATRDFINWLLHTKITDSL

SEQ ID NO: 15 - protein, 35 aa, Sus sp.
HGDGSFSDEMNTVLDNLATRDFINWLLHTKITDSL

SEQ ID NO: 16 - protein, 31 aa, Ovis sp.
HADGSFSDEMNTVLDSLATRDFINWLLQTKI

SEQ ID NO: 17 - protein, 31 aa, Ovis sp.
HGDGSFSDEMNTVLDSLATRDFINWLLQTKI

SEQ ID NO: 18 - protein, 33 aa, Canis sp.
HADGSFSDEMNTVLDTLATRDFINWLLQTKITD

SEQ ID NO: 19 - protein, 33 aa, Canis sp.
HGDGSFSDEMNTVLDTLATRDFINWLLQTKITD

SEQ ID NO: 20 - protein, 33 aa, Gallus sp.
HADGTFTSDINKILDDMAAKEFLKWLINTKVTQ

SEQ ID NO: 21 - protein, 33 aa, Gallus sp.
HGDGTFTSDINKILDDMAAKEFLKWLINTKVTQ

SEQ ID NO: 22 - protein, 33 aa, Meleagris sp.; identical to SEQ ID NO: 20

SEQ ID NO: 23 - protein, 33 aa, Meleagris sp.; identical to SEQ ID NO: 21

SEQ ID NO: 24 - protein, 33 aa, Xenopus laevis
HADGSFTNDINKVLDIIAAQEFLDWVINTQETE

SEQ ID NO: 25 - protein, 12 aa, Artificial Sequence
  Description of Artificial Sequence: Synthetic peptide
GESPGGSSGSES

SEQ ID NO: 26 - protein, 12 aa, Artificial Sequence
  Description of Artificial Sequence: Synthetic peptide
GSEGSSGPGESS

SEQ ID NO: 27 - protein, 12 aa, Artificial Sequence
  Description of Artificial Sequence: Synthetic peptide
GSSESGSSEGGP

SEQ ID NO: 28 - protein, 12 aa, Artificial Sequence
  Description of Artificial Sequence: Synthetic peptide
GSGGEPSESGSS

SEQ ID NO: 29 - protein, 12 aa, Artificial Sequence
  Description of Artificial Sequence: Synthetic peptide
GSPAGSPTSTEE

SEQ ID NO: 30 - protein, 12 aa, Artificial Sequence
  Description of Artificial Sequence: Synthetic peptide
GSEPATSGSETP

SEQ ID NO: 31 - protein, 12 aa, Artificial Sequence
  Description of Artificial Sequence: Synthetic peptide
GTSESATPESGP

SEQ ID NO: 32 - protein, 12 aa, Artificial Sequence
  Description of Artificial Sequence: Synthetic peptide
GTSTEPSEGSAP

SEQ ID NO: 33 - protein, 12 aa, Artificial Sequence
  Description of Artificial Sequence: Synthetic peptide
GSTSESPSGTAP

SEQ ID NO: 34 - protein, 12 aa, Artificial Sequence
  Description of Artificial Sequence: Synthetic peptide
GTSTPESGSASP

SEQ ID NO: 35 - protein, 12 aa, Artificial Sequence
  Description of Artificial Sequence: Synthetic peptide
GTSPSGESSTAP

SEQ ID NO: 36 - protein, 12 aa, Artificial Sequence
  Description of Artificial Sequence: Synthetic peptide
GSTSSTAESPGP

SEQ ID NO: 37 - protein, 12 aa, Artificial Sequence
  Description of Artificial Sequence: Synthetic peptide
GTPGSGTASSSP

SEQ ID NO: 38 - protein, 12 aa, Artificial Sequence
  Description of Artificial Sequence: Synthetic peptide
GSSTPSGATGSP

SEQ ID NO: 39 - protein, 12 aa, Artificial Sequence
  Description of Artificial Sequence: Synthetic peptide
GSSPSASTGTGP

SEQ ID NO: 40 - protein, 12 aa, Artificial Sequence
  Description of Artificial Sequence: Synthetic peptide
GASPGTSSTGSP

SEQ ID NO: 41 - protein, 12 aa, Artificial Sequence
  Description of Artificial Sequence: Synthetic peptide
GEPAGSPTSTSE

SEQ ID NO: 42 - protein, 12 aa, Artificial Sequence
  Description of Artificial Sequence: Synthetic peptide
GTGEPSSTPASE

SEQ ID NO: 43 - protein, 12 aa, Artificial Sequence
  Description of Artificial Sequence: Synthetic peptide
GSGPSTESAPTE

SEQ ID NO: 44 - protein, 12 aa, Artificial Sequence
  Description of Artificial Sequence: Synthetic peptide
GSETPSGPSETA

SEQ ID NO: 45 - protein, 12 aa, Artificial Sequence
  Description of Artificial Sequence: Synthetic peptide
GPSETSTSEPGA

SEQ ID NO: 46 - protein, 12 aa, Artificial Sequence
  Description of Artificial Sequence: Synthetic peptide
GSPSEPTEGTSA

SEQ ID NO: 47 - protein, 12 aa, Artificial Sequence
  Description of Artificial Sequence: Synthetic peptide
GSGASEPTSTEP

SEQ ID NO: 48 - protein, 12 aa, Artificial Sequence
  Description of Artificial Sequence: Synthetic peptide
GSEPATSGTEPS

SEQ ID NO: 49 - protein, 12 aa, Artificial Sequence
  Description of Artificial Sequence: Synthetic peptide
GTSEPSTSEPGA

SEQ ID NO: 50 - protein, 12 aa, Artificial Sequence
  Description of Artificial Sequence: Synthetic peptide
GTSTEPSEPGSA

SEQ ID NO: 51 - protein, 12 aa, Artificial Sequence
  Description of Artificial Sequence: Synthetic peptide
GSTAGSETSTEA

SEQ ID NO: 52 - protein, 12 aa, Artificial Sequence
  Description of Artificial Sequence: Synthetic peptide
GSETATSGSETA

SEQ ID NO: 53 - protein, 12 aa, Artificial Sequence
  Description of Artificial Sequence: Synthetic peptide
GTSESATSESGA

SEQ ID NO: 54 - protein, 12 aa, Artificial Sequence
  Description of Artificial Sequence: Synthetic peptide
GTSTEASEGSAS

SEQ ID NO: 55 - protein, 42 aa, Artificial Sequence
  Description of Artificial Sequence: Synthetic polypeptide
GAPGSPAGSPTSTEEGTSESATPESGPGSEPATSGSETPASS

SEQ ID NO: 56 - protein, 42 aa, Artificial Sequence
  Description of Artificial Sequence: Synthetic polypeptide
TEPSEGSAPGSPAGSPTSTEEGTSESATPESGPGSEPATSGS

SEQ ID NO: 57 - protein, 42 aa, Artificial Sequence
  Description of Artificial Sequence: Synthetic polypeptide
PAGSPTSTEEGTSTEPSEGSAPGTSESATPESGPGSEPATSG

SEQ ID NO: 58 - protein, 42 aa, Artificial Sequence
  Description of Artificial Sequence: Synthetic polypeptide
SEPATSGSETPGTSESATPESGPGTSTEPSEGSAPGSPAGSP

SEQ ID NO: 59 - protein, 42 aa, Artificial Sequence
  Description of Artificial Sequence: Synthetic polypeptide
GAPSPSASTGTGPGTPGSGTASSSPGSSTPSGATGSPGPSGP

SEQ ID NO: 60 - protein, 42 aa, Artificial Sequence
  Description of Artificial Sequence: Synthetic polypeptide
GPGTPGSGTASSSPGSSTPSGATGSPGSSPSASTGTGPGASP

SEQ ID NO: 61 - protein, 42 aa, Artificial Sequence
  Description of Artificial Sequence: Synthetic polypeptide
SPSASTGTGPGASPGTSSTGSPGTPGSGTASSSPGSSTPSGA

SEQ ID NO: 62 - protein, 42 aa, Artificial Sequence
  Description of Artificial Sequence: Synthetic polypeptide
SASTGTGPGASPGTSSTGSPGTPGSGTASSSPGSSTPSGATG

SEQ ID NO: 63 - protein, 48 aa, Artificial Sequence
  Description of Artificial Sequence: Synthetic polypeptide
MAEPAGSPTSTEEGTPGSGTASSSPGSSTPSGATGSPGASPGTSSTGS

SEQ ID NO: 64 - protein, 48 aa, Artificial Sequence
  Description of Artificial Sequence: Synthetic polypeptide
MAEPAGSPTSTEEGASPGTSSTGSPGSSTPSGATGSPGSSTPSGATGS

SEQ ID NO: 65 - protein, 144 aa, Artificial Sequence
  Description of Artificial Sequence: Synthetic polypeptide
GSEPATSGSETPGTSESATPESGPGSEPATSGSETPGSPAGSPTSTEEGTSTEPSEGSAPGSEPATSGSETPGSEPATSGSETPGSEPATSGSETPGTSTEPSEGSAPGTSESATPESGPGSEPATSGSETPGTSTEPSEGSAP

SEQ ID NO: 66 - protein, 144 aa, Artificial Sequence
  Description of Artificial Sequence: Synthetic polypeptide
SPAGSPTSTEEGTSESATPESGPGTSTEPSEGSAPGSPAGSPTSTEEGTSTEPSEGSAPGTSTEPSEGSAPGTSESATPESGPGSEPATSGSETPGSEPATSGSETPGSPAGSPTSTEEGTSESATPESGPGTSTEPSEGSAPG

SEQ ID NO: 67 - protein, 144 aa, Artificial Sequence
  Description of Artificial Sequence: Synthetic polypeptide
TSTEPSEGSAPGSPAGSPTSTEEGTSTEPSEGSAPGTSTEPSEGSAPGTSESATPESGPGTSTEPSEGSAPGTSESATPESGPGSEPATSGSETPGTSTEPSEGSAPGTSTEPSEGSAPGTSESATPESGPGTSESATPESGPG

SEQ ID NO: 68 - protein, 144 aa, Artificial Sequence; identical to SEQ ID NO: 67
  Description of Artificial Sequence: Synthetic polypeptide

SEQ ID NO: 69 - protein, 144 aa, Artificial Sequence
  Description of Artificial Sequence: Synthetic polypeptide
SPAGSPTSTEEGTSESATPESGPGSEPATSGSETPGTSESATPESGPGTSTEPSEGSAPGTSTEPSEGSAPGTSTEPSEGSAPGTSTEPSEGSAPGTSTEPSEGSAPGTSTEPSEGSAPGSPAGSPTSTEEGTSTEPSEGSAPG

SEQ ID NO: 70 - protein, 144 aa, Artificial Sequence; identical to SEQ ID NO: 69
  Description of Artificial Sequence: Synthetic polypeptide

SEQ ID NO: 71 - protein, 144 aa, Artificial Sequence
  Description of Artificial Sequence: Synthetic polypeptide
TSESATPESGPGSEPATSGSETPGTSESATPESGPGSEPATSGSETPGTSESATPESGPGTSTEPSEGSAPGTSESATPESGPGSPAGSPTSTEEGSPAGSPTSTEEGSPAGSPTSTEEGTSESATPESGPGTSTEPSEGSAPG

SEQ ID NO: 72 - protein, 144 aa, Artificial Sequence; identical to SEQ ID NO: 71
  Description of Artificial Sequence: Synthetic polypeptide

SEQ ID NO: 73 - protein, 144 aa, Artificial Sequence
  Description of Artificial Sequence: Synthetic polypeptide
TSESATPESGPGSEPATSGSETPGTSESATPESGPGSEPATSGSETPGTSESATPESGPGTSTEPSEGSAPGSPAGSPTSTEEGTSESATPESGPGSEPATSGSETPGTSESATPESGPGSPAGSPTSTEEGSPAGSPTSTEEG

SEQ ID NO: 74 - protein, 144 aa, Artificial Sequence
  Description of Artificial Sequence: Synthetic polypeptide
TSTEPSEGSAPGTSESATPESGPGTSESATPESGPGTSESATPESGPGSEPATSGSETPGSEPATSGSETPGSPAGSPTSTEEGTSTEPSEGSAPGTSTEPSEGSAPGSEPATSGSETPGTSESATPESGPGTSTEPSEGSAPG

SEQ ID NO: 75 - protein, 144 aa, Artificial Sequence
  Description of Artificial Sequence: Synthetic polypeptide
GTSTPESGSASPGTSPSGESSTAPGTSPSGESSTAPGSTSSTAESPGPGSTSESPSGTAPGSTSSTAESPGPGTSPSGESSTAPGTSTPESGSASPGSTSSTAESPGPGTSPSGESSTAPGTSPSGESSTAPGTSPSGESSTAP

SEQ ID NO: 76 - protein, 144 aa, Artificial Sequence
  Description of Artificial Sequence: Synthetic polypeptide
SGTASSSPGSSTPSGATGSPGTPGSGTASSSPGSSTPSGATGSPGSSTPSGATGSPGSSPSASTGTGPGSSPSASTGTGPGASPGTSSTGSPGTPGSGTASSSPGSSTPSGATGSPGSSPSASTGTGPGSSPSASTGTGPGASP

SEQ ID NO: 77 - protein, 144 aa, Artificial Sequence
  Description of Artificial Sequence: Synthetic polypeptide
PGSSPSASTGTGPGSSPSASTGTGPGTPGSGTASSSPGSSTPSGATGSPGSSPSASTGTGPGASPGTSSTGSPGTPGSGTASSSPGSSTPSGATGSPGTPGSGTASSSPGASPGTSSTGSPGASPGTSSTGSPGTPGSGTASSS

SEQ ID NO: 78 - protein, 144 aa, Artificial Sequence
  Description of Artificial Sequence: Synthetic polypeptide
GASPGTSSTGSPGSSPSASTGTGPGSSPSASTGTGPGTPGSGTASSSPGSSTPSGATGSPGSSPSASTGTGPGASPGTSSTGSPGTPGSGTASSSPGSSTPSGATGSPGTPGSGTASSSPGASPGTSSTGSPGASPGTSSTGSP

SEQ ID NO: 79 - protein, 144 aa, Artificial Sequence
  Description of Artificial Sequence: Synthetic polypeptide
GTPGSGTASSSPGSSTPSGATGSPGASPGTSSTGSPGTPGSGTASSSPGSSTPSGATGSPGSSPSASTGTGPGSSPSASTGTGPGSSTPSGATGSPGSSTPSGATGSPGASPGTSSTGSPGASPGTSSTGSPGASPGTSSTGSP

SEQ ID NO: 80 - protein, 144 aa, Artificial Sequence
  Description of Artificial Sequence: Synthetic polypeptide
GTPGSGTASSSPGASPGTSSTGSPGASPGTSSTGSPGASPGTSSTGSPGSSPSASTGTGPGTPGSGTASSSPGASPGTSSTGSPGASPGTSSTGSPGASPGTSSTGSPGSSTPSGATGSPGSSTPSGATGSPGASPGTSSTGSP

SEQ ID NO: 81 - protein, 144 aa, Artificial Sequence
  Description of Artificial Sequence: Synthetic polypeptide
GSSPSASTGTGPGSSPSASTGTGPGASPGTSSTGSPGASPGTSSTGSPGSSTPSGATGSPGSSPSASTGTGPGASPGTSSTGSPGSSPSASTGTGPGTPGSGTASSSPGSSTPSGATGSPGSSTPSGATGSPGASPGTSSTGSP

SEQ ID NO: 82 - protein, 144 aa, Artificial Sequence
  Description of Artificial Sequence: Synthetic polypeptide
GTPGSGTASSSPGSSTPSGATGSPGSSTPSGATGSPGSSPSASTGTGPGSSPSASTGTGPGASPGTSSTGSPGTPGSGTASSSPGSSTPSGATGSPGSSPSASTGTGPGSSPSASTGTGPGASPGTSSTGSPGASPGTSSTGSP

SEQ ID NO: 83 - protein, 144 aa, Artificial Sequence
  Description of Artificial Sequence: Synthetic polypeptide
GTPGSGTASSSPGSSTPSGATGSPGSSPSASTGTGPGSSPSASTGTGPGASPGTSSTGSPGASPGTSSTGSPGSSTPSGATGSPGSSPSASTGTGPGASPGTSSTGSPGSSPSASTGTGPGTPGSGTASSSPGSSTPSGATGSP

SEQ ID NO: 84 - protein, 288 aa, Artificial Sequence
  Description of Artificial Sequence: Synthetic polypeptide
GTSESATPESGPGSEPATSGSETPGTSESATPESGPGSEPATSGSETPGTSESATPESGPGTSTEPSEGSAPGSPAGSPTSTEEGTSESATPESGPGSEPATSGSETPGTSESATPESGPGSPAGSPTSTEEGSPAGSPTSTEEGTSTEPSEGSAPGTSESATPESGPGTSESATPESGPGTSESATPESGPGSEPATSGSETPGSEPATSGSETPGSPAGSPTSTEEGTSTEPSEGSAPGTSTEPSEGSAPGSEPATSGSETPGTSESATPESGPGTSTEPSEGSAP

SEQ ID NO: 85 - protein, 288 aa, Artificial Sequence
  Description of Artificial Sequence: Synthetic polypeptide
GSPAGSPTSTEEGTSESATPESGPGSEPATSGSETPGTSESATPESGPGTSTEPSEGSAPGTSTEPSEGSAPGTSTEPSEGSAPGTSTEPSEGSAPGTSTEPSEGSAPGTSTEPSEGSAPGSPAGSPTSTEEGTSTEPSEGSAPGTSESATPESGPGSEPATSGSETPGTSESATPESGPGSEPATSGSETPGTSESATPESGPGTSTEPSEGSAPGTSESATPESGPGSPAGSPTSTEEGSPAGSPTSTEEGSPAGSPTSTEEGTSESATPESGPGTSTEPSEGSAP

SEQ ID NO: 86 - protein, 288 aa, Artificial Sequence
  Description of Artificial Sequence: Synthetic polypeptide
PGASPGTSSTGSPGASPGTSSTGSPGTPGSGTASSSPGSSTPSGATGSPGTPGSGTASSSPGSSTPSGATGSPGTPGSGTASSSPGSSTPSGATGSPGSSTPSGATGSPGSSPSASTGTGPGSSPSASTGTGPGASPGTSSTGSPGTPGSGTASSSPGSSTPSGATGSPGSSPSASTGTGPGSSPSASTGTGPGASPGTSSTGSPGASPGTSSTGSPGSSTPSGATGSPGSSPSASTGTGPGASPGTSSTGSPGSSPSASTGTGPGTPGSGTASSSPGSSTPSGATGS

SEQ ID NO: 87 - protein, 288 aa, Artificial Sequence
  Description of Artificial Sequence: Synthetic polypeptide
GSSPSASTGTGPGSSPSASTGTGPGTPGSGTASSSPGSSTPSGATGSPGSSPSASTGTGPGASPGTSSTGSPGTPGSGTASSSPGSSTPSGATGSPGTPGSGTASSSPGASPGTSSTGSPGASPGTSSTGSPGTPGSGTASSSPGSSTPSGATGSPGASPGTSSTGSPGTPGSGTASSSPGSSTPSGATGSPGSSPSASTGTGPGSSPSASTGTGPGSSTPSGATGSPGSSTPSGATGSPGASPGTSSTGSPGASPGTSSTGSPGASPGTSSTGSPGTPGSGTASSSP

SEQ ID NO: 88 - protein, 504 aa, Artificial Sequence
  Description of Artificial Sequence: Synthetic polypeptide
  MOD_RES (63)..(63): Any amino acid
  MOD_RES (207)..(207): Any amino acid
GASPGTSSTGSPGSSPSASTGTGPGSSPSASTGTGPGTPGSGTASSSPGSSTPSGATGSPGSXPSASTGTGPGASPGTSSTGSPGTPGSGTASSSPGSSTPSGATGSPGTPGSGTASSSPGASPGTSSTGSPGASPGTSSTGSPGTPGSGTASSSPGSSTPSGATGSPGASPGTSSTGSPGTPGSGTASSSPGSSTPSGATGSPGSXPSASTGTGPGSSPSASTGTGPGSSTPSGATGSPGSSTPSGATGSPGASPGTSSTGSPGASPGTSSTGSPGASPGTSSTGSPGTPGSGTASSSPGASPGTSSTGSPGASPGTSSTGSPGASPGTSSTGSPGSSPSASTGTGPGTPGSGTASSSPGASPGTSSTGSPGASPGTSSTGSPGASPGTSSTGSPGSSTPSGATGSPGSSTPSGATGSPGASPGTSSTGSPGTPGSGTASSSPGSSTPSGATGSPGSSTPSGATGSPGSSTPSGATGSPGSSPSASTGTGPGASPGTSSTGSP

SEQ ID NO: 89 - protein, 540 aa, Artificial Sequence
  Description of Artificial Sequence: Synthetic polypeptide
GSTSSTAESPGPGSTSSTAESPGPGSTSESPSGTAPGSTSSTAESPGPGSTSSTAESPGPGTSTPESGSASPGSTSESPSGTAPGTSPSGESSTAPGSTSESPSGTAPGSTSESPSGTAPGTSPSGESSTAPGSTSESPSGTAPGSTSESPSGTAPGTSPSGESSTAPGSTSESPSGTAPGSTSESPSGTAPGSTSESPSGTAPGTSTPESGSASPGSTSESPSGTAPGTSTPESGSASPGSTSSTAESPGPGSTSSTAESPGPGTSTPESGSASPGTSTPESGSASPGSTSESPSGTAPGTSTPESGSASPGTSTPESGSASPGSTSESPSGTAPGSTSESPSGTAPGSTSESPSGTAPGSTSSTAESPGPGTSTPESGSASPGTSTPESGSASPGSTSESPSGTAPGSTSESPSGTAPGTSTPESGSASPGSTSESPSGTAPGSTSESPSGTAPGTSTPESGSASPGTSPSGESSTAPGSTSSTAESPGPGTSPSGESSTAPGSTSSTAESPGPGTSTPESGSASPGSTSESPSGTAP

SEQ ID NO: 90 - protein, 576 aa, Artificial Sequence
  Description of Artificial Sequence: Synthetic polypeptide
GSSESGSSEGGPGSGGEPSESGSSGSSESGSSEGGPGSSESGSSEGGPGSSESGSSEGGPGSSESGSSEGGPGSSESGSSEGGPGESPGGSSGSESGSEGSSGPGESSGSSESGSSEGGPGSSESGSSEGGPGSSESGSSEGGPGSGGEPSESGSSGESPGGSSGSESGESPGGSSGSESGSGGEPSESGSSGSSESGSSEGGPGSGGEPSESGSSGSGGEPSESGSSGSEGSSGPGESSGESPGGSSGSESGSGGEPSESGSSGSGGEPSESGSSGSGGEPSESGSSGSSESGSSEGGPGESPGGSSGSESGESPGGSSGSESGESPGGSSGSESGESPGGSSGSESGESPGGSSGSESGSSESGSSEGGPGSGGEPSESGSSGSEGSSGPGESSGSSESGSSEGGPGSGGEPSESGSSGSSESGSSEGGPGSGGEPSESGSSGESPGGSSGSESGESPGGSSGSESGSSESGSSEGGPGSGGEPSESGSSGSSESGSSEGGPGSGGEPSESGSSGSGGEPSESGSSGESPGGSSGSESGSEGSSGPGESSGSSESGSSEGGPGSEGSSGPGESS

SEQ ID NO: 91 - protein, 576 aa, Artificial Sequence
  Description of Artificial Sequence: Synthetic polypeptide
GSPAGSPTSTEEGTSESATPESGPGTSTEPSEGSAPGSPAGSPTSTEEGTSTEPSEGSAPGTSTEPSEGSAPGTSESATPESGPGSEPATSGSETPGSEPATSGSETPGSPAGSPTSTEEGTSESATPESGPGTSTEPSEGSAPGTSTEPSEGSAPGSPAGSPTSTEEGTSTEPSEGSAPGTSTEPSEGSAPGTSESATPESGPGTSTEPSEGSAPGTSESATPESGPGSEPATSGSETPGTSTEPSEGSAPGTSTEPSEGSAPGTSESATPESGPGTSESATPESGPGSPAGSPTSTEEGTSESATPESGPGSEPATSGSETPGTSESATPESGPGTSTEPSEGSAPGTSTEPSEGSAPGTSTEPSEGSAPGTSTEPSEGSAPGTSTEPSEGSAPGTSTEPSEGSAPGSPAGSPTSTEEGTSTEPSEGSAPGTSESATPESGPGSEPATSGSETPGTSESATPESGPGSEPATSGSETPGTSESATPESGPGTSTEPSEGSAPGTSESATPESGPGSPAGSPTSTEEGSPAGSPTSTEEGSPAGSPTSTEEGTSESATPESGPGTSTEPSEGSAP

SEQ ID NO: 92 - protein, 576 aa, Artificial Sequence
  Description of Artificial Sequence: Synthetic polypeptide
GSTSSTAESPGPGSTSSTAESPGPGSTSESPSGTAPGSTSSTAESPGPGSTSSTAESPGPGTSTPESGSASPGSTSESPSGTAPGTSPSGESSTAPGSTSESPSGTAPGSTSESPSGTAPGTSPSGESSTAPGSTSESPSGTAPGSTSESPSGTAPGTSPSGESSTAPGSTSESPSGTAPGSTSESPSGTAPGSTSESPSGTAPGTSTPESGSASPGSTSESPSGTAPGTSTPESGSASPGSTSSTAESPGPGSTSSTAESPGPGTSTPESGSASPGTSTPESGSASPGSTSESPSGTAPGTSTPESGSASPGTSTPESGSASPGSTSESPSGTAPGSTSESPSGTAPGSTSESPSGTAPGSTSSTAESPGPGTSTPESGSASPGTSTPESGSASPGSTSESPSGTAPGSTSESPSGTAPGTSTPESGSASPGSTSESPSGTAPGSTSESPSGTAPGTSTPESGSASPGTSPSGESSTAPGSTSSTAESPGPGTSPSGESSTAPGSTSSTAESPGPGTSTPESGSASPGSTSESPSGTAPGSTSSTAESPGPGTSTPESGSASPGTSTPESGSASP

SEQ ID NO: 93 - protein, 576 aa, Artificial Sequence
  Description of Artificial Sequence: Synthetic polypeptide
PGTPGSGTASSSPGSSTPSGATGSPGSSPSASTGTGPGSSPSASTGTGPGSSTPSGATGSPGSSTPSGATGSPGASPGTSSTGSPGASPGTSSTGSPGASPGTSSTGSPGTPGSGTASSSPGASPGTSSTGSPGASPGTSSTGSPGASPGTSSTGSPGSSPSASTGTGPGTPGSGTASSSPGASPGTSSTGSPGASPGTSSTGSPGASPGTSSTGSPGSSTPSGATGSPGSSTPSGATGSPGASPGTSSTGSPGTPGSGTASSSPGSSTPSGATGSPGSSTPSGATGSPGSSTPSGATGSPGSSPSASTGTGPGASPGTSSTGSPGASPGTSSTGSPGTPGSGTASSSPGASPGTSSTGSPGASPGTSSTGSPGASPGTSSTGSPGASPGTSSTGSPGTPGSGTASSSPGSSTPSGATGSPGTPGSGTASSSPGSSTPSGATGSPGTPGSGTASSSPGSSTPSGATGSPGSSTPSGATGSPGSSPSASTGTGPGSSPSASTGTGPGASPGTSSTGSPGTPGSGTASSSPGSSTPSGATGSPGSSPSASTGTGPGSSPSASTGTGPGASPGTSSTGS

SEQ ID NO: 94 - protein, 625 aa, Artificial Sequence
  Description of Artificial Sequence: Synthetic polypeptide
MAEPAGSPTSTEEGTPGSGTASSSPGSSTPSGATGSPGASPGTSSTGSPGSPAGSPTSTEEGTSESATPESGPGTSTEPSEGSAPGSPAGSPTSTEEGTSTEPSEGSAPGTSTEPSEGSAPGTSESATPESGPGSEPATSGSETPGSEPATSGSETPGSPAGSPTSTEEGTSESATPESGPGTSTEPSEGSAPGTSTEPSEGSAPGSPAGSPTSTEEGTSTEPSEGSAPGTSTEPSEGSAPGTSESATPESGPGTSTEPSEGSAPGTSESATPESGPGSEPATSGSETPGTSTEPSEGSAPGTSTEPSEGSAPGTSESATPESGPGTSESATPESGPGSPAGSPTSTEEGTSESATPESGPGSEPATSGSETPGTSESATPESGPGTSTEPSEGSAPGTSTEPSEGSAPGTSTEPSEGSAPGTSTEPSEGSAPGTSTEPSEGSAPGTSTEPSEGSAPGSPAGSPTSTEEGTSTEPSEGSAPGTSESATPESGPGSEPATSGSETPGTSESATPESGPGSEPATSGSETPGTSESATPESGPGTSTEPSEGSAPGTSESATPESGPGSPAGSPTSTEEGSPAGSPTSTEEGSPAGSPTSTEEGTSESATPESGPGTSTEPSEGSAP

SEQ ID NO: 95 - protein, 836 aa, Artificial Sequence
  Description of Artificial Sequence: Synthetic polypeptide
GSSESGSSEGGPGSSESGSSEGGPGESPGGSSGSESGSGGEPSESGSSGESPGGSSGSESGESPGGSSGSESGSSESGSSEGGPGSSESGSSEGGPGSSESGSSEGGPGESPGGSSGSESGESPGGSSGSESGESPGGSSGSESGSSESGSSEGGPGSSESGSSEGGPGSSESGSSEGGPGSSESGSSEGGPGSSESGSSEGGPGSSESGSSEGGPGSGGEPSESGSSGESPGGSSGSESGESPGGSSGSESGSGGEPSESGSSGSEGSSGPGESSGSSESGSSEGGPGSGGEPSESGSSGSEGSSGPGESSGSSESGSSEGGPGSGGEPSESGSSGESPGGSSGSESGSGGEPSESGSSGSGGEPSESGSSGSSESGSSEGGPGSGGEPSESGSSGSGGEPSESGSSGSEGSSGPGESSGESPGGSSGSESGSEGSSGPGESSGSEGSSGPGESSGSGGEPSESGSSGSSESGSSEGGPGSSESGSSEGGPGESPGGSSGSESGSGGEPSESGSSGSEGSSGPGESSGESPGGSSGSESGSEGSSGPGSSESGSSEGGPGSGGEPSESGSSGSEGSSGPGESSGSEGSSGPGESSGSEGSSGPGESSGSGGEPSESGSSGSGGEPSESGSSGESPGGSSGSESGESPGGSSGSESGSGGEPSESGSSGSEGSSGPGESSGESPGGSSGSESGSSESGSSEGGPGSSESGSSEGGPGSSESGSSEGGPGSGGEPSESGSSGSSESGSSEGGPGESPGGSSGSESGSGGEPSESGSSGSSESGSSEGGPGESPGGSSGSESGSGGEPSESGSSGESPGGSSGSESGSGGEPSESGSS

SEQ ID NO: 96 - protein, 864 aa, Artificial Sequence
  Description of Artificial Sequence: Synthetic polypeptide
GSPAGSPTSTEEGTSESATPESGPGTSTEPSEGSAPGSPAGSPTSTEEGTSTEPSEGSAPGTSTEPSEGSAPGTSESATPESGPGSEPATSGSETPGSEPATSGSETPGSPAGSPTSTEEGTSESATPESGPGTSTEPSEGSAPGTSTEPSEGSAPGSPAGSPTSTEEGTSTEPSEGSAPGTSTEPSEGSAPGTSESATPESGPGTSTEPSEGSAPGTSESATPESGPGSEPATSGSETPGTSTEPSEGSAPGTSTEPSEGSAPGTSESATPESGPGTSESATPESGPGSPAGSPTSTEEGTSESATPESGPGSEPATSGSETPGTSESATPESGPGTSTEPSEGSAPGTSTEPSEGSAPGTSTEPSEGSAPGTSTEPSEGSAPGTSTEPSEGSAPGTSTEPSEGSAPGSPAGSPTSTEEGTSTEPSEGSAPGTSESATPESGPGSEPATSGSETPGTSESATPESGPGSEPATSGSETPGTSESATPESGPGTSTEPSEGSAPGTSESATPESGPGSPAGSPTSTEEGSPAGSPTSTEEGSPAGSPTSTEEGTSESATPESGPGTSTEPSEGSAPGTSESATPESGPGSEPATSGSETPGTSESATPESGPGSEPATSGSETPGTSESATPESGPGTSTEPSEGSAPGSPAGSPTSTEEGTSESATPESGPGSEPATSGSETPGTSESATPESGPGSPAGSPTSTEEGSPAGSPTSTEEGTSTEPSEGSAPGTSESATPESGPGTSESATPESGPGTSESATPESGPGSEPATSGSETPGSEPATSGSETPGSPAGSPTSTEEGTSTEPSEGSAPGTSTEPSEGSAPGSEPATSGSETPGTSESATPESGPGTSTEPSEGSAP

SEQ ID NO: 97 - protein, 875 aa, Artificial Sequence
  Description of Artificial Sequence: Synthetic polypeptide
  MOD_RES (430)..(432): Any amino acid
  MOD_RES (443)..(446): Any amino acid
GSTSESPSGTAPGTSPSGESSTAPGSTSESPSGTAPGSTSESPSGTAPGTSTPESGSASPGTSTPESGSASPGSTSESPSGTAPGSTSESPSGTAPGTSPSGESSTAPGSTSESPSGTAPGTSPSGESSTAPGTSPSGESSTAPGSTSSTAESPGPGTSPSGESSTAPGTSPSGESSTAPGSTSSTAESPGPGTSTPESGSASPGTSTPESGSASPGSTSESPSGTAPGSTSESPSGTAPGTSTPESGSASPGSTSSTAESPGPGTSTPESGSASPGSTSESPSGTAPGTSPSGESSTAPGSTSSTAESPGPGTSPSGESSTAPGTSTPESGSASPGSTSSTAESPGPGSTSSTAESPGPGSTSSTAESPGPGSTSSTAESPGPGTSPSGESSTAPGSTSESPSGTAPGSTSESPSGTAPGTSTPESGPXXXGASASGAPSTXXXXSESPSGTAPGSTSESPSGTAPGSTSESPSGTAPGSTSESPSGTAPGSTSESPSGTAPGSTSESPSGTAPGTSTPESGSASPGTSPSGESSTAPGTSPSGESSTAPGSTSSTAESPGPGTSPSGESSTAPGTSTPESGSASPGSTSESPSGTAPGSTSESPSGTAPGTSPSGESSTAPGSTSESPSGTAPGTSTPESGSASPGTSTPESGSASPGSTSESPSGTAPGTSTPESGSASPGSTSSTAESPGPGSTSESPSGTAPGSTSESPSGTAPGTSPSGESSTAPGSTSSTAESPGPGTSPSGESSTAPGTSTPESGSASPGTSPSGESSTAPGTSPSGESSTAPGTSPSGESSTAPGSTSSTAESPGPGSTSSTAESPGPGTSPSGESSTAPGSSPSASTGTGPGSSTPSGATGSPGSSTPSGATGSP

SEQ ID NO: 98 - protein, 864 aa, Artificial Sequence
  Description of Artificial Sequence: Synthetic polypeptide
GASPGTSSTGSPGSSPSASTGTGPGSSPSASTGTGPGTPGSGTASSSPGSSTPSGATGSPGSSPSASTGTGPGASPGTSSTGSPGTPGSGTASSSPGSSTPSGATGSPGTPGSGTASSSPGASPGTSSTGSPGASPGTSSTGSPGTPGSGTASSSPGSSTPSGATGSPGASPGTSSTGSPGTPGSGTASSSPGSSTPSGATGSPGSSPSASTGTGPGSSPSASTGTGPGSSTPSGATGSPGSSTPSGATGSPGASPGTSSTGSPGASPGTSSTGSPGASPGTSSTGSPGTPGSGTASSSPGASPGTSSTGSPGASPGTSSTGSPGASPGTSSTGSPGSSPSASTGTGPGTPGSGTASSSPGASPGTSSTGSPGASPGTSSTGSPGASPGTSSTGSPGSSTPSGATGSPGSSTPSGATGSPGASPGTSSTGSPGTPGSGTASSSPGSSTPSGATGSPGSSTPSGATGSPGSSTPSGATGSPGSSPSASTGTGPGASPGTSSTGSPGASPGTSSTGSPGTPGSGTASSSPGASPGTSSTGSPGASPGTSSTGSPGASPGTSSTGSPGASPGTSSTGSPGTPGSGTASSSPGSSTPSGATGSPGTPGSGTASSSPGSSTPSGATGSPGTPGSGTASSSPGSSTPSGATGSPGSSTPSGATGSPGSSPSASTGTGPGSSPSASTGTGPGASPGTSSTGSPGTPGSGTASSSPGSSTPSGATGSPGSSPSASTGTGPGSSPSASTGTGPGASPGTSSTGSPGASPGTSSTGSPGSSTPSGATGSPGSSPSASTGTGPGASPGTSSTGSPGSSPSASTGTGPGTPGSGTASSSPGSSTPSGATGSPGSSTPSGATGSPGASPGTSSTGSP

SEQ ID NO: 99 - protein, 875 aa, Artificial Sequence
  Description of Artificial Sequence: Synthetic polypeptide
GTSTEPSEGSAPGSEPATSGSETPGSPAGSPTSTEEGSTSSTAESPGPGTSTPESGSASPGSTSESPSGTAPGSTSESPSGTAPGTSTPESGSASPGTSTPESGSASPGSEPATSGSETPGTSESATPESGPGSPAGSPTSTEEGTSTEPSEGSAPGTSESATPESGPGTSTEPSEGSAPGTSTEPSEGSAPGSPAGSPTSTEEGTSTEPSEGSAPGTSTEPSEGSAPGTSESATPESGPGTSESATPESGPGTSTEPSEGSAPGTSTEPSEGSAPGTSESATPESGPGTSTEPSEGSAPGSEPATSGSETPGSPAGSPTSTEEGSSTPSGATGSPGTPGSGTASSSPGSSTPSGATGSPGTSTEPSEGSAPGTSTEPSEGSAPGSEPATSGSETPGSPAGSPTSTEEGSPAGSPTSTEEGTSTEPSEGSAPGASASGAPSTGGTSESATPESGPGSPAGSPTSTEEGSPAGSPTSTEEGSTSSTAESPGPGSTSESPSGTAPGTSPSGESSTAPGTPGSGTASSSPGSSTPSGATGSPGSSPSASTGTGPGSEPATSGSETPGTSESATPESGPGSEPATSGSETPGSTSSTAESPGPGSTSSTAESPGPGTSPSGESSTAPGSEPATSGSETPGSEPATSGSETPGTSTEPSEGSAPGSTSSTAESPGPGTSTPESGSASPGSTSESPSGTAPGTSTEPSEGSAPGTSTEPSEGSAPGTSTEPSEGSAPGSSTPSGATGSPGSSPSASTGTGPGASPGTSSTGSPGSEPATSGSETPGTSESATPESGPGSPAGSPTSTEEGSSTPSGATGSPGSSPSASTGTGPGASPGTSSTGSPGTSESATPESGPGTSTEPSEGSAPGTSTEPSEGSAP

SEQ ID NO: 100 - protein, 913 aa, Artificial Sequence
  Description of Artificial Sequence: Synthetic polypeptide
MAEPAGSPTSTEEGTPGSGTASSSPGSSTPSGATGSPGASPGTSSTGSPGSPAGSPTSTEEGTSESATPESGPGTSTEPSEGSAPGSPAGSPTSTEEGTSTEPSEGSAPGTSTEPSEGSAPGTSESATPESGPGSEPATSGSETPGSEPATSGSETPGSPAGSPTSTEEGTSESATPESGPGTSTEPSEGSAPGTSTEPSEGSAPGSPAGSPTSTEEGTSTEPSEGSAPGTSTEPSEGSAPGTSESATPESGPGTSTEPSEGSAPGTSESATPESGPGSEPATSGSETPGTSTEPSEGSAPGTSTEPSEGSAPGTSESATPESGPGTSESATPESGPGSPAGSPTSTEEGTSESATPESGPGSEPATSGSETPGTSESATPESGPGTSTEPSEGSAPGTSTEPSEGSAPGTSTEPSEGSAPGTSTEPSEGSAPGTSTEPSEGSAPGTSTEPSEGSAPGSPAGSPTSTEEGTSTEPSEGSAPGTSESATPESGPGSEPATSGSETPGTSESATPESGPGSEPATSGSETPGTSESATPESGPGTSTEPSEGSAPGTSESATPESGPGSPAGSPTSTEEGSPAGSPTSTEEGSPAGSPTSTEEGTSESATPESGPGTSTEPSEGSAPGTSESATPESGPGSEPATSGSETPGTSESATPESGPGSEPATSGSETPGTSESATPESGPGTSTEPSEGSAPGSPAGSPTSTEEGTSESATPESGPGSEPATSGSETPGTSESATPESGPGSPAGSPTSTEEGSPAGSPTSTEEGTSTEPSEGSAPGTSESATPESGPGTSESATPESGPGTSESATPESGPGSEPATSGSETPGSEPATSGSETPGSPAGSPTSTEEGTSTEPSEGSAPGTSTEPSEGSAPGSEPATSGSETPGTSESATPESGPGTSTEPSEGSAP

SEQ ID NO: 101 - protein, 924 aa, Artificial Sequence
  Description of Artificial Sequence: Synthetic polypeptide
MAEPAGSPTSTEEGASPGTSSTGSPGSSTPSGATGSPGSSTPSGATGSPGTSTEPSEGSAPGSEPATSGSETPGSPAGSPTSTEEGSTSSTAESPGPGTSTPESGSASPGSTSESPSGTAPGSTSESPSGTAPGTSTPESGSASPGTSTPESGSASPGSEPATSGSETPGTSESATPESGPGSPAGSPTSTEEGTSTEPSEGSAPGTSESATPESGPGTSTEPSEGSAPGTSTEPSEGSAPGSPAGSPTSTEEGTSTEPSEGSAPGTSTEPSEGSAPGTSESATPESGPGTSESATPESGPGTSTEPSEGSAPGTSTEPSEGSAPGTSESATPESGPGTSTEPSEGSAPGSEPATSGSETPGSPAGSPTSTEEGSSTPSGATGSPGTPGSGTASSSPGSSTPSGATGSPGTSTEPSEGSAPGTSTEPSEGSAPGSEPATSGSETPGSPAGSPTSTEEGSPAGSPTSTEEGTSTEPSEGSAPGASASGAPSTGGTSESATPESGPGSPAGSPTSTEEGSPAGSPTSTEEGSTSSTAESPGPGSTSESPSGTAPGTSPSGESSTAPGTPGSGTASSSPGSSTPSGATGSPGSSPSASTGTGPGSEPATSGSETPGTSESATPESGPGSEPATSGSETPGSTSSTAESPGPGSTSSTAESPGPGTSPSGESSTAPGSEPATSGSETPGSEPATSGSETPGTSTEPSEGSAPGSTSSTAESPGPGTSTPESGSASPGSTSESPSGTAPGTSTEPSEGSAPGTSTEPSEGSAPGTSTEPSEGSAPGSSTPSGATGSPGSSPSASTGTGPGASPGTSSTGSPGSEPATSGSETPGTSESATPESGPGSPAGSPTSTEEGSSTPSGATGSPGSSPSASTGTGPGASPGTSSTGSPGTSESATPESGPGTSTEPSEGSAPGTSTEPSEGSAP

SEQ ID NO: 102 - protein, 1318 aa, Artificial Sequence
  Description of Artificial Sequence: Synthetic polypeptide
GTSTEPSEGSAPGSEPATSGSETPGSPAGSPTSTEEGSTSSTAESPGPGTSTPESGSASPGSTSESPSGTAPGSTSESPSGTAPGTSTPESGSASPGTSTPESGSASPGSEPATSGSETPGTSESATPESGPGSPAGSPTSTEEGTSTEPSEGSAPGTSESATPESGPGTSTEPSEGSAPGTSTEPSEGSAPGSPAGSPTSTEEGTSTEPSEGSAPGTSTEPSEGSAPGTSESATPESGPGTSESATPESGPGTSTEPSEGSAPGTSTEPSEGSAPGTSESATPESGPGTSTEPSEGSAPGSEPATSGSETPGSPAGSPTSTEEGSSTPSGATGSPGTPGSGTASSSPGSSTPSGATGSPGTSTEPSEGSAPGTSTEPSEGSAPGSEPATSGSETPGSPAGSPTSTEEGSPAGSPTSTEEGTSTEPSEGSAPGPEPTGPAPSGGSEPATSGSETPGTSESATPESGPGSPAGSPTSTEEGTSESATPESGPGSPAGSPTSTEEGSPAGSPTSTEEGTSESATPESGPGSPAGSPTSTEEGSPAGSPTSTEEGSTSSTAESPGPGSTSESPSGTAPGTSPSGESSTAPGSTSESPSGTAPGSTSESPSGTAPGTSPSGESSTAPGTSTEPSEGSAPGTSESATPESGPGTSESATPESGPGSEPATSGSETPGTSESATPESGPGTSESATPESGPGTSTEPSEGSAPGTSESATPESGPGTSTEPSEGSAPGTSPSGESSTAPGTSPSGESSTAPGTSPSGESSTAPGTSTEPSEGSAPGSPAGSPTSTEEGTSTEPSEGSAPGSSPSASTGTGPGSSTPSGATGSPGSSTPSGATGSPGSSTPSGATGSPGSSTPSGATGSPGASPGTSSTGSPGASASGAPSTGGTSPSGESSTAPGSTSSTAESPGPGTSPSGESSTAPGTSESATPESGPGTSTEPSEGSAPGTSTEPSEGSAPGSSPSASTGTGPGSSTPSGATGSPGASPGTSSTGSPGTSTPESGSASPGTSPSGESSTAPGTSPSGESSTAPGTSESATPESGPGSEPATSGSETPGTSTEPSEGSAPGSTSESPSGTAPGSTSESPSGTAPGTSTPESGSASPGSPAGSPTSTEEGTSESATPESGPGTSTEPSEGSAPGSPAGSPTSTEEGTSESATPESGPGSEPATSGSETPGSSTPSGATGSPGASPGTSSTGSPGSSTPSGATGSPGSTSESPSGTAPGTSPSGESSTAPGSTSSTAESPGPGSSTPSGATGSPGASPGTSSTGSPGTPGSGTASSSPGSPAGSPTSTEEGSPAGSPTSTEEGTSTEPSEGSAP

SEQ ID NO: 103 - protein, 864 aa, Artificial Sequence
  Description of Artificial Sequence: Synthetic polypeptide
GTSTEPSEPGSAGTSTEPSEPGSAGSEPATSGTEPSGSGASEPTSTEPGSEPATSGTEPSGSEPATSGTEPSGSEPATSGTEPSGSGASEPTSTEPGTSTEPSEPGSAGSEPATSGTEPSGTSTEPSEPGSAGSEPATSGTEPSGSEPATSGTEPSGTSTEPSEPGSAGTSTEPSEPGSAGSEPATSGTEPSGSEPATSGTEPSGTSEPSTSEPGAGSGASEPTSTEPGTSEPSTSEPGAGSEPATSGTEPSGSEPATSGTEPSGTSTEPSEPGSAGTSTEPSEPGSAGSGASEPTSTEPGSEPATSGTEPSGSEPATSGTEPSGSEPATSGTEPSGSEPATSGTEPSGTSTEPSEPGSAGSEPATSGTEPSGSGASEPTSTEPGTSTEPSEPGSAGSEPATSGTEPSGSGASEPTSTEPGTSTEPSEPGSAGSGASEPTSTEPGSEPATSGTEPSGSGASEPTSTEPGSEPATSGTEPSGSGASEPTSTEPGTSTEPSEPGSAGSEPATSGTEPSGSGASEPTSTEPGTSTEPSEPGSAGSEPATSGTEPSGTSTEPSEPGSAGSEPATSGTEPSGTSTEPSEPGSAGTSTEPSEPGSAGTSTEPSEPGSAGTSTEPSEPGSAGTSTEPSEPGSAGTSTEPSEPGSAGTSEPSTSEPGAGSGASEPTSTEPGTSTEPSEPGSAGTSTEPSEPGSAGTSTEPSEPGSAGSEPATSGTEPSGSGASEPTSTEPGSEPATSGTEPSGSEPATSGTEPSGSEPATSGTEPSGSEPATSGTEPSGTSEPSTSEPGAGSEPATSGTEPSGSGASEPTSTEPGTSTEPSEPGSAGSEPATSGTEPSGSGASEPTSTEPGTSTEPSEPGSA

SEQ ID NO: 104 - protein, 864 aa, Artificial Sequence
  Description of Artificial Sequence: Synthetic polypeptide
GSETATSGSETAGTSESATSESGAGSTAGSETSTEAGTSESATSESGAGSETATSGSETAGSETATSGSETAGTSTEASEGSASGTSTEASEGSASGTSESATSESGAGSETATSGSETAGTSTEASEGSASGSTAGSETSTEAGTSESATSESGAGTSESATSESGAGSETATSGSETAGTSESATSESGAGTSTEASEGSASGSETATSGSETAGSETATSGSETAGTSTEASEGSASGSTAGSETSTEAGTSESATSESGAGTSTEASEGSASGSETATSGSETAGSTAGSETSTEAGSTAGSETSTEAGSETATSGSETAGTSESATSESGAGTSESATSESGAGSETATSGSETAGTSESATSESGAGTSESATSESGAGSETATSGSETAGSETATSGSETAGTSTEASEGSASGSTAGSETSTEAGSETATSGSETAGTSESATSESGAGSTAGSETSTEAGSTAGSETSTEAGSTAGSETSTEAGTSTEASEGSASGSTAGSETSTEAGSTAGSETSTEAGTSTEASEGSASGSTAGSETSTEAGSETATSGSETAGTSTEASEGSASGTSESATSESGAGSETATSGSETAGTSESATSESGAGTSESATSESGAGSETATSGSETAGTSESATSESGAGSETATSGSETAGTSTEASEGSASGTSTEASEGSASGSTAGSETSTEAGSTAGSETSTEAGSETATSGSETAGTSESATSESGAGTSESATSESGAGSETATSGSETAGSETATSGSETAGSETATSGSETAGTSTEASEGSASGTSESATSESGAGSETATSGSETAGSETATSGSETAGTSESATSESGAGTSESATSESGAGSETATSGSETA

SEQ ID NO: 105 - protein, 948 aa, Artificial Sequence
  Description of Artificial Sequence: Synthetic polypeptide
GTSTEPSEGSAPGTSESATPESGPGSEPATSGSETPGTSESATPESGPGTSTEPSEGSAPGSPAGSPTSTEEGTSTEPSEGSAPGSEPATSGSETPGTSESATPESGPGTSESATPESGPGSEPATSGSETPGTSTEPSEGSAPGTSESATPESGPGTSTEPSEGSAPGTSTEPSEGSAPGSEPATSGSETPGTSTEPSEGSAPGSEPATSGSETPGSEPATSGSETPGTSTEPSEGSAPGSEPATSGSETPGSEPATSGSETPGTSTEPSEGSAPGSEPATSGSETPGSPAGSPTSTEEGTSESATPESGPGTSTEPSEGSAPGSEPATSGSETPGTSESATPESGPGSEPATSGSETPGSEPATSGSETPGTSESATPESGPGSPAGSPTSTEEGTSESATPESGPGSPAGSPTSTEEGTSTEPSEGSAPGTSESATPESGPGTSTEPSEGSAPGTSTEPSEGSAPGSPAGSPTSTEEGTSTEPSEGSAPGTSESATPESGPGSPAGSPTSTEEGSPAGSPTSTEEGTSESATPESGPGTSESATPESGPGTSTEPSEGSAPGSPAGSPTSTEEGTSESATPESGPGTSTEPSEGSAPGSEPATSGSETPGSPAGSPTSTEEGTSESATPESGPGTSTEPSEGSAPGSEPATSGSETPGSEPATSGSETPGSEPATSGSETPGSPAGSPTSTEEGTSESATPESGPGSEPATSGSETPGSEPATSGSETPGSPAGSPTSTEEGSPAGSPTSTEEGSPAGSPTSTEEGTSESATPESGPGSEPATSGSETPGTSTEPSEGSAPGTSTEPSEGSAPGSPAGSPTSTEEGSPAGSPTSTEEGSPAGSPTSTEEGTSTEPSEGSAPGTSESATPESGPGTSESATPESGPGTSTEPSEGSAPGTSTEPSEGSAPGTSTEPSEGSAPGTSESATPESGPGTSESATPESGP

SEQ ID NO: 106 - protein, 1024 aa, Artificial Sequence
  Description of Artificial Sequence: Synthetic polypeptide
GSEPATSGSETPGSEPATSGSETPGTSTEPSEGSAPGTSESATPESGPGSPAGSPTSTEEGTSTEPSEGSAPGTSESATPESGPGTSESATPESGPGSEPATSGSETPGSEPATSGSETPGTSESATPESGPGTSESATPESGPGSPAGSPTSTEEGTSTEPSEGSAPGSEPATSGSETPGTSTEPSEGSAPGSPAGSPTSTEEGSPAGSPTSTEEGSPAGSPTSTEEGTSTEPSEGSAPGTSESATPESGPGSEPATSGSETPGTSESATPESGPGTSESATPESGPGSPAGSPTSTEEGTSTEPSEGSAPGSEPATSGSETPGTSTEPSEGSAPGTSESATPESGPGSPAGSPTSTEEGTSTEPSEGSAPGTSTEPSEGSAPGSPAGSPTSTEEGTSTEPSEGSAPGTSESATPESGPGSPAGSPTSTEEGTSESATPESGPGSEPATSGSETPGTSTEPSEGSAPGSEPATSGSETPGTSESATPESGPGTSTEPSEGSAPGTSESATPESGPGTSTEPSEGSAPGTSTEPSEGSAPGSEPATSGSETPGSPAGSPTSTEEGTSESATPESGPGTSTEPSEGSAPGSPAGSPTSTEEGTSTEPSEGSAPGTSESATPESGPGTSTEPSEGSAPGSEPATSGSETPGSEPATSGSETPGTSESATPESGPGTSESATPESGPGTSESATPESGPGTSTEPSEGSAPGTSTEPSEGSAPGSPAGSPTSTEEGSPAGSPTSTEEGTSESATPESGPGSPAGSPTSTEEGSPAGSPTSTEEGTSESATPESGPGSEPATSGSETPGTSTEPSEGSAPGSEPATSGSETPGSPAGSPTSTEEGTSESATPESGPGTSESATPESGPGSEPATSGSETPGTSTEPSEGSAPGTSTEPSEGSAPGSPAGSPTSTEEGTSTEPSEGSAPGTSTEPSEGSAPGSEPATSGSETPGSPAGSPTSTEEGTSESATPESGPGTSTEPSEGSAPGSPAGSPTSTEEGTSESATPESGPGTSESATPESGPGTST

SEQ ID NO: 107 - protein, 1024 aa, Artificial Sequence
  Description of Artificial Sequence: Synthetic polypeptide
GSEPATSGSETPGSEPATSGSETPGTSTEPSEGSAPGSEPATSGSETPGTSESATPESGPGSEPATSGSETPGSPAGSPTSTEEGTSESATPESGPGSEPATSGSETPGTSTEPSEGSAPGTSESATPESGPGTSESATPESGPGTSTEPSEGSAPGTSTEPSEGSAPGSEPATSGSETPGSPAGSPTSTEEGTSTEPSEGSAPGSEPATSGSETPGSPAGSPTSTEEGTSTEPSEGSAPGTSESATPESGPGSPAGSPTSTEEGTSTEPSEGSAPGTSESATPESGPGSEPATSGSETPGTSESATPESGPGSEPATSGSETPGTSTEPSEGSAPGTSTEPSEGSAPGTSTEPSEGSAPGSPAGSPTSTEEGSPAGSPTSTEEGTSESATPESGPGTSTEPSEGSAPGTSTEPSEGSAPGSPAGSPTSTEEGSPAGSPTSTEEGSPAGSPTSTEEGTSESATPESGPGSEPATSGSETPGTSESATPESGPGSPAGSPTSTEEGTSTEPSEGSAPGTSESATPESGPGSEPATSGSETPGSPAGSPTSTEEGTSTEPSEGSAPGTSESATPESGPGTSESATPESGPGSPAGSPTSTEEGTSTEPSEGSAPGSPAGSPTSTEEGSPAGSPTSTEEGTSESATPESGPGSEPATSGSETPGTSTEPSEGSAPGSEPATSGSETPGTSESATPESGPGTSTEPSEGSAPGTSESATPESGPGTSESATPESGPGTSTEPSEGSAPGTSTEPSEGSAPGSEPATSGSETPGTSESATPESGPGTSTEPSEGSAPGSEPATSGSETPGSPAGSPTSTEEGTSESATPESGPGSPAGSPTSTEEGTSTEPSEGSAPGSEPATSGSETPGSEPATSGSETPGSEPATSGSETPGTSESATPESGPGTSESATPESGPGTSTEPSEGSAPGTSTEPSEGSAPGSEPATSGSETPGTSTEPSEGSAPGTSESATPESGPGSPAGSPTSTEEGSPAGSPTSTEEGTSTEPSEGSAPGSPAGSPTSTEEGSPA

SEQ ID NO: 108 - protein, 1024 aa, Artificial Sequence
  Description of Artificial Sequence: Synthetic polypeptide
GSPAGSPTSTEEGTSTEPSEGSAPGSPAGSPTSTEEGTSESATPESGPGSEPATSGSETPGTSTEPSEGSAPGTSTEPSEGSAPGTSESATPESGPGTSTEPSEGSAPGTSTEPSEGSAPGSEPATSGSETPGSPAGSPTSTEEGTSESATPESGPGSPAGSPTSTEEGTSTEPSEGSAPGSPAGSPTSTEEGTSTEPSEGSAPGSPAGSPTSTEEGTSTEPSEGSAPGSPAGSPTSTEEGSPAGSPTSTEEGTSTEPSEGSAPGSEPATSGSETPGSPAGSPTSTEEGTSESATPESGPGSEPATSGSETPGSEPATSGSETPGTSESATPESGPGSPAGSPTSTEEGTSESATPESGPGSEPATSGSETPGSEPATSGSETPGTSESATPESGPGTSESATPESGPGTSTEPSEGSAPGTSTEPSEGSAPGTSESATPESGPGSPAGSPTSTEEGTSTEPSEGSAPGSEPATSGSETPGSPAGSPTSTEEGTSTEPSEGSAPGTSTEPSEGSAPGSPAGSPTSTEEGSPAGSPTSTEEGSPAGSPTSTEEGTSESATPESGPGSEPATSGSETPGTSESATPESGPGTSESATPESGPGTSTEPSEGSAPGTSESATPESGPGSPAGSPTSTEEGTSESATPESGPGTSESATPESGPGTSTEPSEGSAPGSEPATSGSETPGTSTEPSEGSAPGSPAGSPTSTEEGTSESATPESGPGTSTEPSEGSAPGTSTEPSEGSAPGSEPATSGSETPGSEPATSGSETPGTSESATPESGPGSEPATSGSETPGSPAGSPTSTEEGTSESATPESGPGSEPATSGSETPGTSTEPSEGSAPGTSESATPESGPGTSESATPESGPGTSTEPSEGSAPGSEPATSGSETPGTSTEPSEGSAPGSPAGSPTSTEEGSPAGSPTSTEEGTSESATPESGPGSEPATSGSETPGSPAGSPTSTEEGSPAGSPTSTEEGTSESATPESGPGSEPATSGSETPGTSTEPSEGSAPGTSTEPSEGSAPGSEP

SEQ ID NO: 109 - protein, 1024 aa, Artificial Sequence
  Description of Artificial Sequence: Synthetic polypeptide
GSPAGSPTSTEEGTSTEPSEGSAPGTSESATPESGPGTSESATPESGPGSEPATSGSETPGTSTEPSEGSAPGTSESATPESGPGSPAGSPTSTEEGTSTEPSEGSAPGTSESATPESGPGSPAGSPTSTEEGTSTEPSEGSAPGTSESATPESGPGTSTEPSEGSAPGSEPATSGSETPGSEPATSGSETPGSEPATSGSETPGTSESATPESGPGSPAGSPTSTEEGTSESATPESGPGSEPATSGSETPGTSESATPESGPGTSESATPESGPGSPAGSPTSTEEGTSTEPSEGSAPGTSESATPESGPGTSTEPSEGSAPGTSTEPSEGSAPGTSTEPSEGSAPGSEPATSGSETPGTSTEPSEGSAPGTSESATPESGPGTSESATPESGPGTSTEPSEGSAPGTSESATPESGPGTSESATPESGPGSEPATSGSETPGTSTEPSEGSAPGTSESATPESGPGSPAGSPTSTEEGSPAGSPTSTEEGTSTEPSEGSAPGSEPATSGSETPGSEPATSGSETPGTSTEPSEGSAPGSEPATSGSETPGSPAGSPTSTEEGTSESATPESGPGSEPATSGSETPGSEPATSGSETPGTSESATPESGPGTSESATPESGPGTSTEPSEGSAPGSPAGSPTSTEEGTSESATPESGPGTSTEPSEGSAPGSEPATSGSETPGSPAGSPTSTEEGTSTEPSEGSAPGTSTEPSEGSAPGSEPATSGSETPGTSESATPESGPGTSTEPSEGSAPGSPAGSPTSTEEGTSESATPESGPGTSESATPESGPGTSTEPSEGSAPGSEPATSGSETPGSEPATSGSETPGTSTEPSEGSAPGTSESATPESGPGSPAGSPTSTEEGTSTEPSEGSAPGTSTEPSEGSAPGSPAGSPTSTEEGSPAGSPTSTEEGTSTEPSEGSAPGSEPATSGSETPGSPAGSPTSTEEGTSESATPESGPGSEPATSGSETPGSEPATSGSETPGTSESATPESGPGTSESATPESGPGTSTEPSEGSAPGTST

SEQ ID NO: 110 - protein, 1024 aa, Artificial Sequence
  Description of Artificial Sequence: Synthetic polypeptide
GSEPATSGSETPGSPAGSPTSTEEGTSTEPSEGSAPGSEPATSGSETPGTSESATPESGPGTSTEPSEGSAPGTSESATPESGPGSPAGSPTSTEEGTSTEPSEGSAPGTSTEPSEGSAPGSPAGSPTSTEEGTSTEPSEGSAPGTSESATPESGPGSEPATSGSETPGTSESATPESGPGSEPATSGSETPGTSTEPSEGSAPGTSTEPSEGSAPGSEPATSGSETPGTSTEPSEGSAPGTSTEPSEGSAPGSPAGSPTSTEEGTSTEPSEGSAPGTSESATPESGPGTSESATPESGPGTSTEPSEGSAPGTSTEPSEGSAPGSPAGSPTSTEEGSPAGSPTSTEEGTSTEPSEGSAPGSEPATSGSETPGSPAGSPTSTEEGTSTEPSEGSAPGSPAGSPTSTEEGSPAGSPTSTEEGTSESATPESGPGSEPATSGSETPGSEPATSGSETPGTSTEPSEGSAPGSPAGSPTSTEEGSPAGSPTSTEEGTSESATPESGPGSEPATSGSETPGSEPATSGSETPGTSESATPESGPGSEPATSGSETPGSEPATSGSETPGTSESATPESGPGTSESATPESGPGTSESATPESGPGTSESATPESGPGSPAGSPTSTEEGTSTEPSEGSAPGTSESATPESGPGTSTEPSEGSAPGTSTEPSEGSAPGTSESATPESGPGTSTEPSEGSAPGTSESATPESGPGSPAGSPTSTEEGTSTEPSEGSAPGSEPATSGSETPGTSTEPSEGSAPGSEPATSGSETPGTSTEPSEGSAPGTSTEPSEGSAPGSPAGSPTSTEEGTSESATPESGPGTSTEPSEGSAPGSEPATSGSETPGTSESATPESGPGTSESATPESGPGTSESATPESGPGTSTEPSEGSAPGSEPATSGSETPGSPAGSPTSTEEGTSESATPESGPGTSTEPSEGSAPGTSTEPSEGSAPGSPAGSPTSTEEGTSESATPESGPGTSTEPSEGSAPGTSTEPSEGSAPGSPAGSPTSTEEGTSESATPESGPGSPA

SEQ ID NO: 111 - protein, 1024 aa, Artificial Sequence
  Description of Artificial Sequence: Synthetic polypeptide
GTSTEPSEGSAPGTSTEPSEGSAPGTSTEPSEGSAPGTSTEPSEGSAPGSPAGSPTSTEEGSPAGSPTSTEEGTSESATPESGPGSEPATSGSETPGTSTEPSEGSAPGTSESATPESGPGTSTEPSEGSAPGTSESATPESGPGTSESATPESGPGSPAGSPTSTEEGTSTEPSEGSAPGSEPATSGSETPGTSTEPSEGSAPGSPAGSPTSTEEGTSTEPSEGSAPGSPAGSPTSTEEGSPAGSPTSTEEGSPAGSPTSTEEGTSESATPESGPGSEPATSGSETPGTSESATPESGPGTSESATPESGPGSPAGSPTSTEEGTSTEPSEGSAPGSEPATSGSETPGTSTEPSEGSAPGSPAGSPTSTEEGSPAGSPTSTEEGTSTEPSEGSAPGSEPATSGSETPGSPAGSPTSTEEGTSESATPESGPGSEPATSGSETPGSPAGSPTSTEEGTSESATPESGPGTSESATPESGPGTSTEPSEGSAPGSEPATSGSETPGSEPATSGSETPGTSESATPESGPGSEPATSGSETPGTSTEPSEGSAPGSPAGSPTSTEEGTSTEPSEGSAPGSEPATSGSETPGSEPATSGSETPGSPAGSPTSTEEGTSESATPESGPGTSTEPSEGSAPGSPAGSPTSTEEGSPAGSPTSTEEGTSESATPESGPGSPAGSPTSTEEGTSTEPSEGSAPGSEPATSGSETPGSEPATSGSETPGSEPATSGSETPGTSESATPESGPGTSESATPESGPGTSTEPSEGSAPGTSTEPSEGSAPGSEPATSGSETPGTSTEPSEGSAPGTSESATPESGPGSPAGSPTSTEEGSPAGSPTSTEEGTSTEPSEGSAPGTSESATPESGPGSPAGSPTSTEEGTSTEPSEGSAPGSEPATSGSETPGTSESATPESGPGSEPATSGSETPGTSESATPESGPGSEPATSGSETPGSEPATSGSETPGTSTEPSEGSAPGTSESATPESGPGTSTEPSEGSAPGTSTEPSEGSAPGTSESATPESGPGSPA

SEQ ID NO: 112 - protein, 1024 aa, Artificial Sequence
  Description of Artificial Sequence: Synthetic polypeptide
GSEPATSGSETPGTSTEPSEGSAPGSEPATSGSETPGTSTEPSEGSAPGTSESATPESGPGTSESATPESGPGSEPATSGSETPGTSTEPSEGSAPGTSTEPSEGSAPGTSESATPESGPGTSTEPSEGSAPGTSTEPSEGSAPGSEPATSGSETPGSPAGSPTSTEEGTSESATPESGPGTSESATPESGPGTSTEPSEGSAPGTSESATPESGPGSEPATSGSETPGTSESATPESGPGTSESATPESGPGTSTEPSEGSAPGTSTEPSEGSAPGSEPATSGSETPGSPAGSPTSTEEGTSESATPESGPGSEPATSGSETPGSEPATSGSETPGTSESATPESGPGTSESATPESGPGSPAGSPTSTEEGTSTEPSEGSAPGTSESATPESGPGTSTEPSEGSAPGTSTEPSEGSAPGTSESATPESGPGTSTEPSEGSAPGSPAGSPTSTEEGSPAGSPTSTEEGTSESATPESGPGSEPATSGSETPGSEPATSGSETPGTSTEPSEGSAPGTSESATPESGPGSPAGSPTSTEEGSPAGSPTSTEEGTSTEPSEGSAPGSPAGSPTSTEEGSPAGSPTSTEEGTSESATPESGPGSEPATSGSETPGTSTEPSEGSAPGTSTEPSEGSAPGSEPATSGSETPGSPAGSPTSTEEGTSESATPESGPGSPAGSPTSTEEGTSTEPSEGSAPGTSESATPESGPGSEPATSGSETPGTSESATPESGPGTSESATPESGPGSPAGSPTSTEEGTSTEPSEGSAPGSEPATSGSETPGSPAGSPTSTEEGTSTEPSEGSAPGSEPATSGSETPGSEPATSGSETPGTSESATPESGPGTSESATPESGPGTSTEPSEGSAPGTSESATPESGPGSEPATSGSETPGTSESATPESGPGTSESATPESGPGTSTEPSEGSAPGTSESATPESGPGSEPATSGSETPGTSTEPSEGSAPGSPAGSPTSTEEGTSESATPESGPGTSTEPSEGSAPGTSTEPSEGSAPGSPAGSPTSTEEGTST

SEQ ID NO: 113 - protein, 1024 aa, Artificial Sequence
  Description of Artificial Sequence: Synthetic polypeptide
GTSESATPESGPGTSTEPSEGSAPGTSESATPESGPGTSTEPSEGSAPGSEPATSGSETPGSPAGSPTSTEEGTSESATPESGPGSEPATSGSETPGSEPATSGSETPGTSESATPESGPGTSESATPESGPGTSTEPSEGSAPGSEPATSGSETPGSEPATSGSETPGTSESATPESGPGTSESATPESGPGSEPATSGSETPGTSESATPESGPGSPAGSPTSTEEGSPAGSPTSTEEGTSTEPSEGSAPGSEPATSGSETPGSPAGSPTSTEEGTSESATPESGPGSPAGSPTSTEEGTSTEPSEGSAPGSEPATSGSETPGSPAGSPTSTEEGTSESATPESGPGSPAGSPTSTEEGSPAGSPTSTEEGTSTEPSEGSAPGSEPATSGSETPGSPAGSPTSTEEGTSESATPESGPGTSTEPSEGSAPGSPAGSPTSTEEGTSESATPESGPGSEPATSGSETPGTSTEPSEGSAPGSPAGSPTSTEEGTSTEPSEGSAPGTSESATPESGPGTSESATPESGPGTSTEPSEGSAPGTSTEPSEGSAPGSEPATSGSETPGTSESATPESGPGTSESATPESGPGTSTEPSEGSAPGTSTEPSEGSAPGSPAGSPTSTEEGSPAGSPTSTEEGTSTEPSEGSAPGSEPATSGSETPGSEPATSGSETPGTSESATPESGPGSPAGSPTSTEEGTSESATPESGPGTSTEPSEGSAPGTSTEPSEGSAPGSPAGSPTSTEEGSPAGSPTSTEEGTSESATPESGPGSPAGSPTSTEEGTSTEPSEGSAPGSEPATSGSETPGSPAGSPTSTEEGSPAGSPTSTEEGTSTEPSEGSAPGTSESATPESGPGTSESATPESGPGSPAGSPTSTEEGTSTEPSEGSAPGSPAGSPTSTEEGTSTEPSEGSAPGSPAGSPTSTEEGTSTEPSEGSAPGTSTEPSEGSAPGSEPATSGSETPGSPAGSPTSTEEGTSESATPESGPGSEPATSGSETPGSPAGSPTSTEEGTSESATPESGPGTSE

SEQ ID NO: 114 - protein, 1024 aa, Artificial Sequence
  Description of Artificial Sequence: Synthetic polypeptide
GTSESATPESGPGSPAGSPTSTEEGSPAGSPTSTEEGTSESATPESGPGSEPATSGSETPGTSTEPSEGSAPGTSTEPSEGSAPGTSTEPSEGSAPGSPAGSPTSTEEGTSTEPSEGSAPGTSESATPESGPGTSESATPESGPGSPAGSPTSTEEGSPAGSPTSTEEGSPAGSPTSTEEGTSESATPESGPGSEPATSGSETPGTSESATPESGPGTSTEPSEGSAPGTSESATPESGPGTSTEPSEGSAPGTSTEPSEGSAPGTSESATPESGPGSPAGSPTSTEEGTSESATPESGPGTSTEPSEGSAPGSPAGSPTSTEEGTSESATPESGPGSEPATSGSETPGTSTEPSEGSAPGSEPATSGSETPGSEPATSGSETPGTSESATPESGPGTSESATPESGPGTSTEPSEGSAPGTSESATPESGPGSPAGSPTSTEEGTSTEPSEGSAPGSEPATSGSETPGTSESATPESGPGSEPATSGSETPGTSTEPSEGSAPGTSESATPESGPGSPAGSPTSTEEGSPAGSPTSTEEGSPAGSPTSTEEGTSESATPESGPGSEPATSGSETPGTSESATPESGPGTSESATPESGPGSEPATSGSETPGTSTEPSEGSAPGTSTEPSEGSAPGTSTEPSEGSAPGTSESATPESGPGSEPATSGSETPGTSESATPESGPGSEPATSGSETPGTSTEPSEGSAPGSEPATSGSETPGSPAGSPTSTEEGTSESATPESGPGTSESATPESGPGTSESATPESGPGSPAGSPTSTEEGTSTEPSEGSAPGTSESATPESGPGTSESATPESGPGTSTEPSEGSAPGTSTEPSEGSAPGSPAGSPTSTEEGTSESATPESGPGSEPATSGSETPGTSESATPESGPGTSESATPESGPGTSTEPSEGSAPGSEPATSGSETPGTSESATPESGPGSPAGSPTSTEEGTSTEPSEGSAPGSEPATSGSETPGSPAGSPTSTEEGTSESATPESGPGSPAGSPTSTEEGTSTEPSEGSAPGSEP

SEQ ID NO: 115 - protein, 1024 aa, Artificial Sequence
  Description of Artificial Sequence: Synthetic polypeptide
GSEPATSGSETPGTSTEPSEGSAPGTSESATPESGPGSEPATSGSETPGTSTEPSEGSAPGSPAGSPTSTEEGTSESATPESGPGSPAGSPTSTEEGTSTEPSEGSAPGSEPATSGSETPGTSTEPSEGSAPGTSESATPESGPGSEPATSGSETPGSEPATSGSETPGTSESATPESGPGTSTEPSEGSAPGTSESATPESGPGTSESATPESGPGSPAGSPTSTEEGSPAGSPTSTEEGTSESATPESGPGTSESATPESGPGTSTEPSEGSAPGTSTEPSEGSAPGSPAGSPTSTEEGTSTEPSEGSAPGSEPATSGSETPGSEPATSGSETPGSEPATSGSETPGSEPATSGSETPGTSESATPESGPGTSESATPESGPGTSESATPESGPGTSTEPSEGSAPGTSESATPESGPGTSESATPESGPGTSTEPSEGSAPGSPAGSPTSTEEGTSTEPSEGSAPGSEPATSGSETPGSPAGSPTSTEEGTSESATPESGPGTSTEPSEGSAPGSEPATSGSETPGTSESATPESGPGTSESATPESGPGTSTEPSEGSAPGSEPATSGSETPGSPAGSPTSTEEGTSESATPESGPGTSESATPESGPGTSTEPSEGSAPGSEPATSGSETPGSPAGSPTSTEEGTSESATPESGPGSEPATSGSETPGTSTEPSEGSAPGSEPATSGSETPGSPAGSPTSTEEGTSESATPESGPGTSTEPSEGSAPGSEPATSGSETPGTSESATPESGPGTSESATPESGPGSPAGSPTSTEEGTSTEPSEGSAPGSPAGSPTSTEEGSPAGSPTSTEEGSPAGSPTSTEEGTSESATPESGPGSEPATSGSETPGTSTEPSEGSAPGTSTEPSEGSAPGTSESATPESGPGTSTEPSEGSAPGTSESATPESGPGSEPATSGSETPGTSTEPSEGSAPGTSESATPESGPGSPAGSPTSTEEGSPAGSPTSTEEGSPAGSPTSTEEGTSESATPESGPGSPAGSPTSTEEGTSESATPESGPGSEP

SEQ ID NO: 116 - protein, 1024 aa, Artificial Sequence
  Description of Artificial Sequence: Synthetic polypeptide
GTSTEPSEGSAPGSEPATSGSETPGTSTEPSEGSAPGTSTEPSEGSAPGSEPATSGSETPGSPAGSPTSTEEGSPAGSPTSTEEGTSESATPESGPGSEPATSGSETPGTSTEPSEGSAPGTSTEPSEGSAPGSPAGSPTSTEEGTSESATPESGPGTSESATPESGPGSPAGSPTSTEEGTSTEPSEGSAPGTSESATPESGPGTSTEPSEGSAPGSEPATSGSETPGTSESATPESGPGSEPATSGSETPGTSTEPSEGSAPGTSTEPSEGSAPGSPAGSPTSTEEGSPAGSPTSTEEGTSESATPESGPGSPAGSPTSTEEGTSTEPSEGSAPGSEPATSGSETPGSEPATSGSETPGSPAGSPTSTEEGTSESATPESGPGTSTEPSEGSAPGSEPATSGSETPGTSESATPESGPGSEPATSGSETPGSPAGSPTSTEEGTSESATPESGPGTSESATPESGPGSEPATSGSETPGTSESATPESGPGTSESATPESGPGTSESATPESGPGTSTEPSEGSAPGTSESATPESGPGSEPATSGSETPGTSTEPSEGSAPGSPAGSPTSTEEGTSTEPSEGSAPGSEPATSGSETPGSPAGSPTSTEEGTSESATPESGPGTSESATPESGPGTSTEPSEGSAPGTSESATPESGPGTSTEPSEGSAPGTSESATPESGPGSEPATSGSETPGTSTEPSEGSAPGTSTEPSEGSAPGSPAGSPTSTEEGSPAGSPTSTEEGTSESATPESGPGTSTEPSEGSAPGTSESATPESGPGSPAGSPTSTEEGSPAGSPTSTEEGSPAGSPTSTEEGTSTEPSEGSAPGSPAGSPTSTEEGSPAGSPTSTEEGTSESATPESGPGSEPATSGSETPGSEPATSGSETPGTSESATPESGPGSEPATSGSETPGTSESATPESGPGTSTEPSEGSAPGTSTEPSEGSAPGSPAGSPTSTEEGSPAGSPTSTEEGTSESATPESGPGSPAGSPTSTEEGTSTEPSEGSAPGTSESATPESGPGTSE

SEQ ID NO: 117 - protein, 948 aa, Artificial Sequence
  Description of Artificial Sequence: Synthetic polypeptide
GSSTPSGATGSPGTPGSGTASSSPGASPGTSSTGSPGSSPSASTGTGPGTPGSGTASSSPGTPGSGTASSSPGTPGSGTASSSPGSSPSASTGTGPGTPGSGTASSSPGSSPSASTGTGPGSSTPSGATGSPGSSTPSGATGSPGSSPSASTGTGPGSSTPSGATGSPGASPGTSSTGSPGASPGTSSTGSPGSSPSASTGTGPGSSPSASTGTGPGASPGTSSTGSPGSSPSASTGTGPGASPGTSSTGSPGSSPSASTGTGPGASPGTSSTGSPGTPGSGTASSSPGTPGSGTASSSPGSSTPSGATGSPGSSTPSGATGSPGSSTPSGATGSPGASPGTSSTGSPGSSPSASTGTGPGASPGTSSTGSPGASPGTSSTGSPGSSTPSGATGSPGSSPSASTGTGPGSSPSASTGTGPGTPGSGTASSSPGASPGTSSTGSPGTPGSGTASSSPGSSTPSGATGSPGSSTPSGATGSPGSSPSASTGTGPGSSPSASTGTGPGSSTPSGATGSPGASPGTSSTGSPGTPGSGTASSSPGSSPSASTGTGPGSSTPSGATGSPGASPGTSSTGSPGSSTPSGATGSPGTPGSGTASSSPGSSPSASTGTGPGSSTPSGATGSPGASPGTSSTGSPGASPGTSSTGSPGTPGSGTASSSPGTPGSGTASSSPGSSPSASTGTGPGASPGTSSTGSPGASPGTSSTGSPGTPGSGTASSSPGTPGSGTASSSPGSSTPSGATGSPGSSPSASTGTGPGSSTPSGATGSPGSSPSASTGTGPGSSPSASTGTGPGTPGSGTASSSPGSSTPSGATGSPGASPGTSSTGSPGTPGSGTASSSPGTPGSGTASSSPGSSTPSGATGSPGTPGSGTASSSPGASPGTSSTGSPGSSTPSGATGSPGSSTPSGATGSPGTPGSGTASSSPGSSTPSGATGSPGSSTPSGATGSP

SEQ ID NO: 118 - protein, 1024 aa, Artificial Sequence
  Description of Artificial Sequence: Synthetic polypeptide
GTPGSGTASSSPGTPGSGTASSSPGSSPSASTGTGPGTPGSGTASSSPGASPGTSSTGSPGTPGSGTASSSPGSSPSASTGTGPGSSTPSGATGSPGASPGTSSTGSPGASPGTSSTGSPGSSPSASTGTGPGSSTPSGATGSPGSSPSASTGTGPGSSPSASTGTGPGTPGSGTASSSPGTPGSGTASSSPGASPGTSSTGSPGSSTPSGATGSPGSSPSASTGTGPGTPGSGTASSSPGASPGTSSTGSPGTPGSGTASSSPGSSPSASTGTGPGSSPSASTGTGPGASPGTSSTGSPGASPGTSSTGSPGSSTPSGATGSPGSSTPSGATGSPGTPGSGTASSSPGSSPSASTGTGPGSSTPSGATGSPGASPGTSSTGSPGSSTPSGATGSPGSSTPSGATGSPGSSPSASTGTGPGASPGTSSTGSPGTPGSGTASSSPGASPGTSSTGSPGSSPSASTGTGPGTPGSGTASSSPGASPGTSSTGSPGASPGTSSTGSPGSSTPSGATGSPGTPGSGTASSSPGSSTPSGATGSPGASPGTSSTGSPGTPGSGTASSSPGTPGSGTASSSPGSSTPSGATGSPGSSTPSGATGSPGTPGSGTASSSPGSSTPSGATGSPGSSTPSGATGSPGASPGTSSTGSPGSSPSASTGTGPGSSPSASTGTGPGASPGTSSTGSPGASPGTSSTGSPGTPGSGTASSSPGSSPSASTGTGPGTPGSGTASSSPGSSTPSGATGSPGSSTPSGATGSPGASPGTSSTGSPGSSPSASTGTGPGASPGTSSTGSPGSSPSASTGTGPGSSPSASTGTGPGASPGTSSTGSPGASPGTSSTGSPGSSTPSGATGSPGASPGTSSTGSPGASPGTSSTGSPGTPGSGTASSSPGTPGSGTASSSPGTPGSGTASSSPGSSTPSGATGSPGSSTPSGATGSPGSSPSASTGTGPGSSPSASTGTGPGTPGSGTASSSPGSSPSASTGTGPGASPGTSSTGSPGSSTPSGATGSPGTPGSGTASSSPGSST

SEQ ID NO: 119 - protein, 1024 aa, Artificial Sequence
  Description of Artificial Sequence: Synthetic polypeptide
GASPGTSSTGSPGSSPSASTGTGPGSSTPSGATGSPGASPGTSSTGSPGASPGTSSTGSPGSSTPSGATGSPGTPGSGTASSSPGASPGTSSTGSPGTPGSGTASSSPGTPGSGTASSSPGSSTPSGATGSPGSSTPSGATGSPGTPGSGTASSSPGSSTPSGATGSPGSSTPSGATGSPGSSPSASTGTGPGSSPSASTGTGPGASPGTSSTGSPGTPGSGTASSSPGASPGTSSTGSPGSSTPSGATGSPGTPGSGTASSSPGSSPSASTGTGPGSSTPSGATGSPGSSPSASTGTGPGSSTPSGATGSPGASPGTSSTGSPGSSPSASTGTGPGTPGSGTASSSPGASPGTSSTGSPGSSTPSGATGSPGASPGTSSTGSPGSSPSASTGTGPGTPGSGTASSSPGTPGSGTASSSPGASPGTSSTGSPGTPGSGTASSSPGTPGSGTASSSPGSSPSASTGTGPGASPGTSSTGSPGSSTPSGATGSPGASPGTSSTGSPGSSPSASTGTGPGTPGSGTASSSPGSSPSASTGTGPGSSPSASTGTGPGASPGTSSTGSPGASPGTSSTGSPGTPGSGTASSSPGASPGTSSTGSPGASPGTSSTGSPGTPGSGTASSSPGTPGSGTASSSPGSSTPSGATGSPGSSTPSGATGSPGTPGSGTASSSPGSSPSASTGTGPGTPGSGTASSSPGSSTPSGATGSPGSSTPSGATGSPGASPGTSSTGSPGTPGSGTASSSPGASPGTSSTGSPGSSTPSGATGSPGSSTPSGATGSPGTPGSGTASSSPGSSTPSGATGSPGSSTPSGATGSPGASPGTSSTGSPGSSPSASTGTGPGSSTPSGATGSPGSSTPSGATGSPGSSPSASTGTGPGSSPSASTGTGPGSSTPSGATGSPGASPGTSSTGSPGSSPSASTGTGPGTPGSGTASSSPGASPGTSSTGSPGSSPSASTGTGPGASPGTSSTGSPGSSTPSGATGSPGSSPSASTGTGPGSSPSASTGTGPGASPGTSSTGSPGSST

SEQ ID NO: 120 - protein, 1024 aa, Artificial Sequence
  Description of Artificial Sequence: Synthetic polypeptide
GSSPSASTGTGPGTPGSGTASSSPGSSPSASTGTGPGSSPSASTGTGPGTPGSGTASSSPGASPGTSSTGSPGSSTPSGATGSPGTPGSGTASSSPGASPGTSSTGSPGTPGSGTASSSPGTPGSGTASSSPGSSPSASTGTGPGSSPSASTGTGPGSSTPSGATGSPGASPGTSSTGSPGSSPSASTGTGPGTPGSGTASSSPGTPGSGTASSSPGSSTPSGATGSPGASPGTSSTGSPGSSPSASTGTGPGTPGSGTASSSPGTPGSGTASSSPGASPGTSSTGSPGSSTPSGATGSPGSSTPSGATGSPGSSPSASTGTGPGSSPSASTGTGPGASPGTSSTGSPGSSPSASTGTGPGSSTPSGATGSPGASPGTSSTGSPGASPGTSSTGSPGSSTPSGATGSPGSSPSASTGTGPGASPGTSSTGSPGASPGTSSTGSPGTPGSGTASSSPGSSTPSGATGSPGASPGTSSTGSPGSSTPSGATGSPGTPGSGTASSSPGSSPSASTGTGPGSSTPSGATGSPGTPGSGTASSSPGSSTPSGATGSPGSSTPSGATGSPGASPGTSSTGSPGSSPSASTGTGPGSSPSASTGTGPGASPGTSSTGSPGSSPSASTGTGPGTPGSGTASSSPGTPGSGTASSSPGASPGTSSTGSPGTPGSGTASSSPGASPGTSSTGSPGTPGSGTASSSPGASPGTSSTGSPGSSTPSGATGSPGASPGTSSTGSPGSSPSASTGTGPGTPGSGTASSSPGTPGSGTASSSPGSSPSASTGTGPGTPGSGTASSSPGASPGTSSTGSPGSSTPSGATGSPGTPGSGTASSSPGASPGTSSTGSPGTPGSGTASSSPGTPGSGTASSSPGSSTPSGATGSPGTPGSGTASSSPGSSPSASTGTGPGSSTPSGATGSPGTPGSGTASSSPGSSTPSGATGSPGSSTPSGATGSPGSSPSASTGTGPGASPGTSSTGSPGTPGSGTASSSPGSSPSASTGTGPGSSPSASTGTGPGASPGTSSTGSPGASP

SEQ ID NO: 121 - protein, 1024 aa, Artificial Sequence
  Description of Artificial Sequence: Synthetic polypeptide
GSSTPSGATGSPGSSPSASTGTGPGTPGSGTASSSPGSSPSASTGTGPGASPGTSSTGSPGSSPSASTGTGPGTPGSGTASSSPGASPGTSSTGSPGSSTPSGATGSPGSSPSASTGTGPGSSTPSGATGSPGASPGTSSTGSPGTPGSGTASSSPGASPGTSSTGSPGSSTPSGATGSPGSSTPSGATGSPGSSPSASTGTGPGTPGSGTASSSPGSSTPSGATGSPGSSTPSGATGSPGSSPSASTGTGPGTPGSGTASSSPGASPGTSSTGSPGTPGSGTASSSPGASPGTSSTGSPGASPGTSSTGSPGTPGSGTASSSPGTPGSGTASSSPGSSTPSGATGSPGSSTPSGATGSPGSSTPSGATGSPGASPGTSSTGSPGSSPSASTGTGPGSSTPSGATGSPGSSPSASTGTGPGSSTPSGATGSPGTPGSGTASSSPGSSPSASTGTGPGSSTPSGATGSPGASPGTSSTGSPGASPGTSSTGSPGSSPSASTGTGPGASPGTSSTGSPGSSTPSGATGSPGASPGTSSTGSPGTPGSGTASSSPGTPGSGTASSSPGSSPSASTGTGPGTPGSGTASSSPGSSTPSGATGSPGSSPSASTGTGPGSSTPSGATGSPGTPGSGTASSSPGTPGSGTASSSPGSSPSASTGTGPGSSTPSGATGSPGSSTPSGATGSPGSSPSASTGTGPGSSPSASTGTGPGASPGTSSTGSPGASPGTSSTGSPGSSTPSGATGSPGASPGTSSTGSPGSSPSASTGTGPGTPGSGTASSSPGASPGTSSTGSPGASPGTSSTGSPGTPGSGTASSSPGTPGSGTASSSPGSSPSASTGTGPGTPGSGTASSSPGASPGTSSTGSPGSSTPSGATGSPGTPGSGTASSSPGTPGSGTASSSPGSSTPSGATGSPGSSTPSGATGSPGTPGSGTASSSPGSSPSASTGTGPGSSPSASTGTGPGASPGTSSTGSPGSSPSASTGTGPGSSPSASTGTGPGASPGTSSTGSPGASPGTSSTGSPGTPG

SEQ ID NO: 122 - protein, 1024 aa, Artificial Sequence
  Description of Artificial Sequence: Synthetic polypeptide
GTPGSGTASSSPGSSTPSGATGSPGASPGTSSTGSPGSSTPSGATGSPGTPGSGTASSSPGTPGSGTASSSPGSSTPSGATGSPGSSTPSGATGSPGASPGTSSTGSPGSSPSASTGTGPGSSTPSGATGSPGASPGTSSTGSPGSSPSASTGTGPGTPGSGTASSSPGASPGTSSTGSPGASPGTSSTGSPGTPGSGTASSSPGTPGSGTASSSPGASPGTSSTGSPGASPGTSSTGSPGTPGSGTASSSPGTPGSGTASSSPGSSPSASTGTGPGSSPSASTGTGPGASPGTSSTGSPGSSPSASTGTGPGSSPSASTGTGPGASPGTSSTGSPGASPGTSSTGSPGTPGSGTASSSPGTPGSGTASSSPGSSPSASTGTGPGASPGTSSTGSPGSSTPSGATGSPGASPGTSSTGSPGSSPSASTGTGPGSSTPSGATGSPGSSPSASTGTGPGSSPSASTGTGPGASPGTSSTGSPGSSPSASTGTGPGSSPSASTGTGPGASPGTSSTGSPGASPGTSSTGSPGSSPSASTGTGPGTPGSGTASSSPGASPGTSSTGSPGSSTPSGATGSPGTPGSGTASSSPGTPGSGTASSSPGSSPSASTGTGPGSSTPSGATGSPGASPGTSSTGSPGASPGTSSTGSPGSSTPSGATGSPGSSPSASTGTGPGASPGTSSTGSPGSSTPSGATGSPGTPGSGTASSSPGASPGTSSTGSPGTPGSGTASSSPGASPGTSSTGSPGSSTPSGATGSPGSSTPSGATGSPGASPGTSSTGSPGSSPSASTGTGPGTPGSGTASSSPGTPGSGTASSSPGSSTPSGATGSPGTPGSGTASSSPGASPGTSSTGSPGSSTPSGATGSPGTPGSGTASSSPGSSPSASTGTGPGSSTPSGATGSPGSSTPSGATGSPGSSPSASTGTGPGSSTPSGATGSPGTPGSGTASSSPGSSPSASTGTGPGTPGSGTASSSPGSSTPSGATGSPGSSPSASTGTGPGSSPSASTGTGPGTPGSGTASSSPGASP

SEQ ID NO: 123 - protein, 1024 aa, Artificial Sequence
  Description of Artificial Sequence: Synthetic polypeptide
GSSTPSGATGSPGTPGSGTASSSPGTPGSGTASSSPGASPGTSSTGSPGSSTPSGATGSPGTPGSGTASSSPGSSTPSGATGSPGSSPSASTGTGPGSSTPSGATGSPGTPGSGTASSSPGTPGSGTASSSPGSSPSASTGTGPGSSTPSGATGSPGSSPSASTGTGPGTPGSGTASSSPGASPGTSSTGSPGSSTPSGATGSPGASPGTSSTGSPGTPGSGTASSSPGSSTPSGATGSPGTPGSGTASSSPGSSPSASTGTGPGASPGTSSTGSPGASPGTSSTGSPGTPGSGTASSSPGSSTPSGATGSPGSSTPSGATGSPGSSPSASTGTGPGSSPSASTGTGPGASPGTSSTGSPGTPGSGTASSSPGTPGSGTASSSPGSSPSASTGTGPGASPGTSSTGSPGASPGTSSTGSPGTPGSGTASSSPGSSPSASTGTGPGASPGTSSTGSPGASPGTSSTGSPGSSTPSGATGSPGSSPSASTGTGPGSSPSASTGTGPGTPGSGTASSSPGTPGSGTASSSPGASPGTSSTGSPGSSTPSGATGSPGTPGSGTASSSPGASPGTSSTGSPGTPGSGTASSSPGTPGSGTASSSPGSSTPSGATGSPGSSTPSGATGSPGTPGSGTASSSPGSSPSASTGTGPGSSTPSGATGSPGSSTPSGATGSPGSSPSASTGTGPGTPGSGTASSSPGSSPSASTGTGPGASPGTSSTGSPGSSPSASTGTGPGTPGSGTASSSPGASPGTSSTGSPGASPGTSSTGSPGTPGSGTASSSPGTPGSGTASSSPGSSTPSGATGSPGTPGSGTASSSPGASPGTSSTGSPGSSTPSGATGSPGSSTPSGATGSPGSSTPSGATGSPGTPGSGTASSSPGSSPSASTGTGPGSSPSASTGTGPGSSPSASTGTGPGASPGTSSTGSPGASPGTSSTGSPGSSPSASTGTGPGTPGSGTASSSPGASPGTSSTGSPGSSTPSGATGSPGASPGTSSTGSPGASPGTSSTGSPGSSTPSGATGSPGTPG

SEQ ID NO: 124 - protein, 1024 aa, Artificial Sequence
  Description of Artificial Sequence: Synthetic polypeptide
GSSTPSGATGSPGSSTPSGATGSPGTPGSGTASSSPGSSPSASTGTGPGTPGSGTASSSPGASPGTSSTGSPGSSTPSGATGSPGASPGTSSTGSPGTPGSGTASSSPGASPGTSSTGSPGSSPSASTGTGPGTPGSGTASSSPGASPGTSSTGSPGSSTPSGATGSPGSSPSASTGTGPGSSTPSGATGSPGASPGTSSTGSPGASPGTSSTGSPGASPGTSSTGSPGSSTPSGATGSPGASPGTSSTGSPGTPGSGTASSSPGSSTPSGATGSPGSSTPSGATGSPGSSPSASTGTGPGSSPSASTGTGPGSSTPSGATGSPGSSPSASTGTGPGSSPSASTGTGPGASPGTSSTGSPGASPGTSSTGSPGTPGSGTASSSPGSSPSASTGTGPGSSPSASTGTGPGASPGTSSTGSPGSSPSASTGTGPGTPGSGTASSSPGSSPSASTGTGPGSSTPSGATGSPGASPGTSSTGSPGSSTPSGATGSPGTPGSGTASSSPGSSPSASTGTGPGASPGTSSTGSPGSSTPSGATGSPGASPGTSSTGSPGASPGTSSTGSPGTPGSGTASSSPGASPGTSSTGSPGASPGTSSTGSPGSSTPSGATGSPGTPGSGTASSSPGSSPSASTGTGPGSSTPSGATGSPGTPGSGTASSSPGSSTPSGATGSPGSSTPSGATGSPGSSPSASTGTGPGSSPSASTGTGPGSSTPSGATGSPGASPGTSSTGSPGSSPSASTGTGPGTPGSGTASSSPGASPGTSSTGSPGSSPSASTGTGPGSSTPSGATGSPGSSPSASTGTGPGSSTPSGATGSPGSSPSASTGTGPGTPGSGTASSSPGTPGSGTASSSPGSSTPSGATGSPGSSTPSGATGSPGTPGSGTASSSPGSSPSASTGTGPGSSTPSGATGSPGSSPSASTGTGPGSSPSASTGTGPGSSTPSGATGSPGASPGTSSTGSPGASPGTSSTGSPGTPGSGTASSSPGTPGSGTASSSPGTPGSGTASSSPGSSTPSGATGSPGSST

SEQ ID NO: 125 - protein, 1024 aa, Artificial Sequence
  Description of Artificial Sequence: Synthetic polypeptide
GASPGTSSTGSPGSSPSASTGTGPGSSTPSGATGSPGSSPSASTGTGPGTPGSGTASSSPGSSTPSGATGSPGSSTPSGATGSPGSSPSASTGTGPGSSTPSGATGSPGTPGSGTASSSPGSSPSASTGTGPGSSTPSGATGSPGASPGTSSTGSPGSSPSASTGTGPGSSPSASTGTGPGTPGSGTASSSPGASPGTSSTGSPGSSTPSGATGSPGSSPSASTGTGPGASPGTSSTGSPGSSTPSGATGSPGTPGSGTASSSPGSSPSASTGTGPGSSPSASTGTGPGSSPSASTGTGPGTPGSGTASSSPGTPGSGTASSSPGSSTPSGATGSPGTPGSGTASSSPGSSPSASTGTGPGASPGTSSTGSPGASPGTSSTGSPGTPGSGTASSSPGSSPSASTGTGPGASPGTSSTGSPGTPGSGTASSSPGSSTPSGATGSPGSSTPSGATGSPGASPGTSSTGSPGTPGSGTASSSPGSSPSASTGTGPGTPGSGTASSSPGASPGTSSTGSPGSSTPSGATGSPGASPGTSSTGSPGASPGTSSTGSPGTPGSGTASSSPGTPGSGTASSSPGSSPSASTGTGPGSSPSASTGTGPGSSPSASTGTGPGTPGSGTASSSPGASPGTSSTGSPGSSTPSGATGSPGASPGTSSTGSPGSSPSASTGTGPGASPGTSSTGSPGSSPSASTGTGPGASPGTSSTGSPGSSPSASTGTGPGSSPSASTGTGPGTPGSGTASSSPGASPGTSSTGSPGTPGSGTASSSPGTPGSGTASSSPGASPGTSSTGSPGSSTPSGATGSPGSSTPSGATGSPGSSPSASTGTGPGSSTPSGATGSPGTPGSGTASSSPGSSPSASTGTGPGSSTPSGATGSPGSSTPSGATGSPGSSPSASTGTGPGSSPSASTGTGPGASPGTSSTGSPGTPGSGTASSSPGSSPSASTGTGPGSSTPSGATGSPGASPGTSSTGSPGASPGTSSTGSPGSSPSASTGTGPGASPGTSSTGSPGASPGTSSTGSPGTPG

SEQ ID NO: 126 - protein, 1024 aa, Artificial Sequence
  Description of Artificial Sequence: Synthetic polypeptide
GSSTPSGATGSPGSSPSASTGTGPGASPGTSSTGSPGASPGTSSTGSPGTPGSGTASSSPGSSPSASTGTGPGASPGTSSTGSPGSSTPSGATGSPGSSTPSGATGSPGASPGTSSTGSPGSSPSASTGTGPGTPGSGTASSSPGTPGSGTASSSPGASPGTSSTGSPGSSTPSGATGSPGSSTPSGATGSPGSSPSASTGTGPGTPGSGTASSSPGASPGTSSTGSPGSSTPSGATGSPGTPGSGTASSSPGSSPSASTGTGPGSSTPSGATGSPGTPGSGTASSSPGSSPSASTGTGPGTPGSGTASSSPGASPGTSSTGSPGSSTPSGATGSPGSSTPSGATGSPGTPGSGTASSSPGSSTPSGATGSPGSSTPSGATGSPGASPGTSSTGSPGASPGTSSTGSPGASPGTSSTGSPGSSTPSGATGSPGTPGSGTASSSPGSSPSASTGTGPGTPGSGTASSSPGASPGTSSTGSPGTPGSGTASSSPGASPGTSSTGSPGSSTPSGATGSPGSSPSASTGTGPGSSPSASTGTGPGTPGSGTASSSPGASPGTSSTGSPGASPGTSSTGSPGTPGSGTASSSPGASPGTSSTGSPGSSTPSGATGSPGSSTPSGATGSPGSSPSASTGTGPGASPGTSSTGSPGASPGTSSTGSPGTPGSGTASSSPGTPGSGTASSSPGSSTPSGATGSPGSSPSASTGTGPGSSPSASTGTGPGASPGTSSTGSPGASPGTSSTGSPGSSTPSGATGSPGSSPSASTGTGPGASPGTSSTGSPGSSTPSGATGSPGTPGSGTASSSPGSSPSASTGTGPGASPGTSSTGSPGSSTPSGATGSPGTPGSGTASSSPGSSTPSGATGSPGSSTPSGATGSPGSSTPSGATGSPGSSPSASTGTGPGSSPSASTGTGPGSSTPSGATGSPGSSPSASTGTGPGSSPSASTGTGPGSSTPSGATGSPGASPGTSSTGSPGASPGTSSTGSPGTPGSGTASSSPGASPGTSSTGSPGSSTPSGATGSPGASP

SEQ ID NO: 127 - protein, 1024 aa, Artificial Sequence
  Description of Artificial Sequence: Synthetic polypeptide
GSSPSASTGTGPGSSPSASTGTGPGSSPSASTGTGPGTPGSGTASSSPGSSPSASTGTGPGSSPSASTGTGPGASPGTSSTGSPGSSPSASTGTGPGTPGSGTASSSPGTPGSGTASSSPGASPGTSSTGSPGTPGSGTASSSPGTPGSGTASSSPGSSPSASTGTGPGSSTPSGATGSPGSSPSASTGTGPGASPGTSSTGSPGSSPSASTGTGPGASPGTSSTGSPGASPGTSSTGSPGTPGSGTASSSPGTPGSGTASSSPGASPGTSSTGSPGTPGSGTASSSPGTPGSGTASSSPGSSPSASTGTGPGSSTPSGATGSPGASPGTSSTGSPGSSTPSGATGSPGSSPSASTGTGPGSSPSASTGTGPGSSTPSGATGSPGASPGTSSTGSPGSSPSASTGTGPGTPGSGTASSSPGASPGTSSTGSPGASPGTSSTGSPGTPGSGTASSSPGTPGSGTASSSPGSSTPSGATGSPGTPGSGTASSSPGASPGTSSTGSPGSSTPSGATGSPGTPGSGTASSSPGSSPSASTGTGPGSSPSASTGTGPGSSTPSGATGSPGASPGTSSTGSPGASPGTSSTGSPGTPGSGTASSSPGTPGSGTASSSPGSSTPSGATGSPGSSPSASTGTGPGSSPSASTGTGPGASPGTSSTGSPGASPGTSSTGSPGSSTPSGATGSPGASPGTSSTGSPGASPGTSSTGSPGTPGSGTASSSPGTPGSGTASSSPGTPGSGTASSSPGSSTPSGATGSPGSSTPSGATGSPGSSPSASTGTGPGSSPSASTGTGPGSSTPSGATGSPGTPGSGTASSSPGSSPSASTGTGPGASPGTSSTGSPGSSTPSGATGSPGSSPSASTGTGPGSSTPSGATGSPGASPGTSSTGSPGSSPSASTGTGPGTPGSGTASSSPGSSPSASTGTGPGSSTPSGATGSPGASPGTSSTGSPGSSPSASTGTGPGTPGSGTASSSPGSSTPSGATGSPGSSTPSGATGSPGASPGTSSTGSPGSSPSASTGTGPGSSP

SEQ ID NO: 128 - protein, 1024 aa, Artificial Sequence
  Description of Artificial Sequence: Synthetic polypeptide
GSSPSASTGTGPGTPGSGTASSSPGSSTPSGATGSPGTPGSGTASSSPGSSTPSGATGSPGSSTPSGATGSPGSSPSASTGTGPGSSPSASTGTGPGSSPSASTGTGPGTPGSGTASSSPGASPGTSSTGSPGSSTPSGATGSPGTPGSGTASSSPGTPGSGTASSSPGSSTPSGATGSPGSSTPSGATGSPGSSPSASTGTGPGASPGTSSTGSPGASPGTSSTGSPGASPGTSSTGSPGASPGTSSTGSPGTPGSGTASSSPGTPGSGTASSSPGSSPSASTGTGPGSSTPSGATGSPGASPGTSSTGSPGSSTPSGATGSPGSSTPSGATGSPGSSPSASTGTGPGASPGTSSTGSPGTPGSGTASSSPGSSPSASTGTGPGSSPSASTGTGPGASPGTSSTGSPGASPGTSSTGSPGTPGSGTASSSPGASPGTSSTGSPGTPGSGTASSSPGTPGSGTASSSPGSSTPSGATGSPGTPGSGTASSSPGASPGTSSTGSPGSSTPSGATGSPGSSTPSGATGSPGSSPSASTGTGPGSSTPSGATGSPGSSTPSGATGSPGASPGTSSTGSPGSSPSASTGTGPGTPGSGTASSSPGASPGTSSTGSPGSSPSASTGTGPGTPGSGTASSSPGSSPSASTGTGPGTPGSGTASSSPGASPGTSSTGSPGASPGTSSTGSPGTPGSGTASSSPGTPGSGTASSSPGSSTPSGATGSPGSSTPSGATGSPGTPGSGTASSSPGSSTPSGATGSPGSSTPSGATGSPGASPGTSSTGSPGSSPSASTGTGPGSSTPSGATGSPGSSPSASTGTGPGSSPSASTGTGPGASPGTSSTGSPGSSTPSGATGSPGASPGTSSTGSPGTPGSGTASSSPGTPGSGTASSSPGSSPSASTGTGPGASPGTSSTGSPGSSTPSGATGSPGSSPSASTGTGPGSSPSASTGTGPGASPGTSSTGSPGTPGSGTASSSPGSSTPSGATGSPGTPGSGTASSSPGSSPSASTGTGPGSSPSASTGTGPGASP

SEQ ID NO: 129 - protein, 72 aa, Artificial Sequence
  Description of Artificial Sequence: Synthetic polypeptide
SPAGSPTSTEEGSPAGSPTSTEEGTSESATPESGPGTSTEPSEGSAPGTSESATPESGPGSEPATSGSETPG

SEQ ID NO: 130 - protein, 72 aa, Artificial Sequence
  Description of Artificial Sequence: Synthetic polypeptide
TSESATPESGPGTSESATPESGPGSEPATSGSETPGSEPATSGSETPGSPAGSPTSTEEGTSTEPSEGSAPG

SEQ ID NO: 131 - protein, 108 aa, Artificial Sequence
  Description of Artificial Sequence: Synthetic polypeptide
TEEGTSESATPESGPGTSTEPSEGSAPGSPAGSPTSTEEGTSTEPSEGSAPGTSTEPSEGSAPGTSESATPESGPGSEPATSGSETPGSEPATSGSETPGSPAGSPTS

SEQ ID NO: 132 - protein, 108 aa, Artificial Sequence
  Description of Artificial Sequence: Synthetic polypeptide
GSPAGSPTSTEEGTSTEPSEGSAPGTSESATPESGPGTSESATPESGPGTSESATPESGPGSEPATSGSETPGSEPATSGSETPGSPAGSPTSTEEGTSTEPSEGSAP

SEQ ID NO: 133 - protein, 144 aa, Artificial Sequence
  Description of Artificial Sequence: Synthetic polypeptide
STEPSEGSAPGSPAGSPTSTEEGTSTEPSEGSAPGTSESATPESGPGSEPATSGSETPGTSESATPESGPGSEPATSGSETPGTSESATPESGPGTSTEPSEGSAPGTSESATPESGPGSPAGSPTSTEEGSPAGSPTSTEEGS

SEQ ID NO: 134 - protein, 144 aa, Artificial Sequence
  Description of Artificial Sequence: Synthetic polypeptide
SEPATSGSETPGTSESATPESGPGSEPATSGSETPGTSESATPESGPGTSTEPSEGSAPGSPAGSPTSTEEGTSESATPESGPGSEPATSGSETPGTSESATPESGPGSPAGSPTSTEEGSPAGSPTSTEEGTSTEPSEGSAPG

SEQ ID NO: 135 - protein, 180 aa, Artificial Sequence
  Description of Artificial Sequence: Synthetic polypeptide
TSTEEGTSESATPESGPGSEPATSGSETPGTSESATPESGPGSPAGSPTSTEEGSPAGSPTSTEEGTSTEPSEGSAPGTSESATPESGPGTSESATPESGPGTSESATPESGPGSEPATSGSETPGSEPATSGSETPGSPAGSPTSTEEGTSTEPSEGSAPGTSTEPSEGSAPGSEPATS

SEQ ID NO: 136 - protein, 216 aa, Artificial Sequence
  Description of Artificial Sequence: Synthetic polypeptide
PESGPGTSTEPSEGSAPGSPAGSPTSTEEGTSESATPESGPGSEPATSGSETPGTSESATPESGPGSPAGSPTSTEEGSPAGSPTSTEEGTSTEPSEGSAPGTSESATPESGPGTSESATPESGPGTSESATPESGPGSEPATSGSETPGSEPATSGSETPGSPAGSPTSTEEGTSTEPSEGSAPGTSTEPSEGSAPGSEPATSGSETPGTSESAT

SEQ ID NO: 137 - protein, 252 aa, Artificial Sequence
  Description of Artificial Sequence: Synthetic polypeptide
ESGPGSEPATSGSETPGTSESATPESGPGTSTEPSEGSAPGSPAGSPTSTEEGTSESATPESGPGSEPATSGSETPGTSESATPESGPGSPAGSPTSTEEGSPAGSPTSTEEGTSTEPSEGSAPGTSESATPESGPGTSESATPESGPGTSESATPESGPGSEPATSGSETPGSEPATSGSETPGSPAGSPTSTEEGTSTEPSEGSAPGTSTEPSEGSAPGSEPATSGSETPGTSESATPESGPGTSTEPSE

SEQ ID NO: 138 - protein, 288 aa, Artificial Sequence
  Description of Artificial Sequence: Synthetic polypeptide
TPESGPGTSTEPSEGSAPGTSESATPESGPGSEPATSGSETPGTSESATPESGPGSEPATSGSETPGTSESATPESGPGTSTEPSEGSAPGSPAGSPTSTEEGTSESATPESGPGSEPATSGSETPGTSESATPESGPGSPAGSPTSTEEGSPAGSPTSTEEGTSTEPSEGSAPGTSESATPESGPGTSESATPESGPGTSESATPESGPGSEPATSGSETPGSEPATSGSETPGSPAGSPTSTEEGTSTEPSEGSAPGTSTEPSEGSAPGSEPATSGSETPGTSESA

SEQ ID NO: 139 - protein, 324 aa, Artificial Sequence
  Description of Artificial Sequence: Synthetic polypeptide
PESGPGSPAGSPTSTEEGSPAGSPTSTEEGSPAGSPTSTEEGTSESATPESGPGTSTEPSEGSAPGTSESATPESGPGSEPATSGSETPGTSESATPESGPGSEPATSGSETPGTSESATPESGPGTSTEPSEGSAPGSPAGSPTSTEEGTSESATPESGPGSEPATSGSETPGTSESATPESGPGSPAGSPTSTEEGSPAGSPTSTEEGTSTEPSEGSAPGTSESATPESGPGTSESATPESGPGTSESATPESGPGSEPATSGSETPGSEPATSGSETPGSPAGSPTSTEEGTSTEPSEGSAPGTSTEPSEGSAPGSEPATS

SEQ ID NO: 140 - protein, 360 aa, Artificial Sequence
  Description of Artificial Sequence: Synthetic polypeptide
PESGPGTSTEPSEGSAPGTSESATPESGPGSPAGSPTSTEEGSPAGSPTSTEEGSPAGSPTSTEEGTSESATPESGPGTSTEPSEGSAPGTSESATPESGPGSEPATSGSETPGTSESATPESGPGSEPATSGSETPGTSESATPESGPGTSTEPSEGSAPGSPAGSPTSTEEGTSESATPESGPGSEPATSGSETPGTSESATPESGPGSPAGSPTSTEEGSPAGSPTSTEEGTSTEPSEGSAPGTSESATPESGPGTSESATPESGPGTSESATPESGPGSEPATSGSETPGSEPATSGSETPGSPAGSPTSTEEGTSTEPSEGSAPGTSTEPSEGSAPGSEPATSGSETPGTSESAT

SEQ ID NO: 141 - protein, 360 aa, Artificial Sequence
  Description of Artificial Sequence: Synthetic polypeptide
PESGPGSEPATSGSETPGTSESATPESGPGTSTEPSEGSAPGTSESATPESGPGSPAGSPTSTEEGSPAGSPTSTEEGSPAGSPTSTEEGTSESATPESGPGTSTEPSEGSAPGTSESATPESGPGSEPATSGSETPGTSESATPESGPGSEPATSGSETPGTSESATPESGPGTSTEPSEGSAPGSPAGSPTSTEEGTSESATPESGPGSEPATSGSETPGTSESATPESGPGSPAGSPTSTEEGSPAGSPTSTEEGTSTEPSEGSAPGTSESATPESGPGTSESATPESGPGTSESATPESGPGSEPATSGSETPGSEPATSGSETPGSPAGSPTSTEEGTSTEPSEGSAPGTSTEPS

SEQ ID NO: 142 - protein, 432 aa, Artificial Sequence
  Description of Artificial Sequence: Synthetic polypeptide
EGSAPGSPAGSPTSTEEGTSTEPSEGSAPGTSESATPESGPGSEPATSGSETPGTSESATPESGPGSEPATSGSETPGTSESATPESGPGTSTEPSEGSAPGTSESATPESGPGSPAGSPTSTEEGSPAGSPTSTEEGSPAGSPTSTEEGTSESATPESGPGTSTEPSEGSAPGTSESATPESGPGSEPATSGSETPGTSESATPESGPGSEPATSGSETPGTSESATPESGPGTSTEPSEGSAPGSPAGSPTSTEEGTSESATPESGPGSEPATSGSETPGTSESATPESGPGSPAGSPTSTEEGSPAGSPTSTEEGTSTEPSEGSAPGTSESATPESGPGTSESATPESGPGTSESATPESGPGSEPATSGSETPGSEPATSGSETPGSPAGSPTSTEEGTSTEPSEGSAPGTSTEPSEGSAPGSEPATS

SEQ ID NO: 143 - protein, 468 aa, Artificial Sequence
  Description of Artificial Sequence: Synthetic polypeptide
EGSAPGTSTEPSEGSAPGTSTEPSEGSAPGSPAGSPTSTEEGTSTEPSEGSAPGTSESATPESGPGSEPATSGSETPGTSESATPESGPGSEPATSGSETPGTSESATPESGPGTSTEPSEGSAPGTSESATPESGPGSPAGSPTSTEEGSPAGSPTSTEEGSPAGSPTSTEEGTSESATPESGPGTSTEPSEGSAPGTSESATPESGPGSEPATSGSETPGTSESATPESGPGSEPATSGSETPGTSESATPESGPGTSTEPSEGSAPGSPAGSPTSTEEGTSESATPESGPGSEPATSGSETPGTSESATPESGPGSPAGSPTSTEEGSPAGSPTSTEEGTSTEPSEGSAPGTSESATPESGPGTSESATPESGPGTSESATPESGPGSEPATSGSETPGSEPATSGSETPGSPAGSPTSTEEGTSTEPSEGSAPGTSTEPSEGSAPGSEPATSGSETPGTSESAT

SEQ ID NO: 144 - protein, 504 aa, Artificial Sequence
  Description of Artificial Sequence: Synthetic polypeptide
EGSAPGTSTEPSEGSAPGTSTEPSEGSAPGTSTEPSEGSAPGTSTEPSEGSAPGSPAGSPTSTEEGTSTEPSEGSAPGTSESATPESGPGSEPATSGSETPGTSESATPESGPGSEPATSGSETPGTSESATPESGPGTSTEPSEGSAPGTSESATPESGPGSPAGSPTSTEEGSPAGSPTSTEEGSPAGSPTSTEEGTSESATPESGPGTSTEPSEGSAPGTSESATPESGPGSEPATSGSETPGTSESATPESGPGSEPATSGSETPGTSESATPESGPGTSTEPSEGSAPGSPAGSPTSTEEGTSESATPESGPGSEPATSGSETPGTSESATPESGPGSPAGSPTSTEEGSPAGSPTSTEEGTSTEPSEGSAPGTSESATPESGPGTSESATPESGPGTSESATPESGPGSEPATSGSETPGSEPATSGSETPGSPAGSPTSTEEGTSTEPSEGSAPGTSTEPSEGSAPGSEPATSGSETPGTSESATPESGPGTSTEPS

SEQ ID NO: 145 - protein, 540 aa, Artificial Sequence
  Description of Artificial Sequence: Synthetic polypeptide
TPESGPGSPAGSPTSTEEGTSESATPESGPGSEPATSGSETPGTSESATPESGPGTSTEPSEGSAPGTSTEPSEGSAPGTSTEPSEGSAPGTSTEPSEGSAPGTSTEPSEGSAPGTSTEPSEGSAPGSPAGSPTSTEEGTSTEPSEGSAPGTSESATPESGPGSEPATSGSETPGTSESATPESGPGSEPATSGSETPGTSESATPESGPGTSTEPSEGSAPGTSESATPESGPGSPAGSPTSTEEGSPAGSPTSTEEGSPAGSPTSTEEGTSESATPESGPGTSTEPSEGSAPGTSESATPESGPGSEPATSGSETPGTSESATPESGPGSEPATSGSETPGTSESATPESGPGTSTEPSEGSAPGSPAGSPTSTEEGTSESATPESGPGSEPATSGSETPGTSESATPESGPGSPAGSPTSTEEGSPAGSPTSTEEGTSTEPSEGSAPGTSESATPESGPGTSESATPESGPGTSESATPESGPGSEPATSGSETPGSEPATSGSETPGSPAGSPTSTEEGTSTEPSEGSAPGTSTEP

SEQ ID NO: 146 - protein, 576 aa, Artificial Sequence
  Description of Artificial Sequence: Synthetic polypeptide
TPESGPGTSESATPESGPGSPAGSPTSTEEGTSESATPESGPGSEPATSGSETPGTSESATPESGPGTSTEPSEGSAPGTSTEPSEGSAPGTSTEPSEGSAPGTSTEPSEGSAPGTSTEPSEGSAPGTSTEPSEGSAPGSPAGSPTSTEEGTSTEPSEGSAPGTSESATPESGPGSEPATSGSETPGTSESATPESGPGSEPATSGSETPGTSESATPESGPGTSTEPSEGSAPGTSESATPESGPGSPAGSPTSTEEGSPAGSPTSTEEGSPAGSPTSTEEGTSESATPESGPGTSTEPSEGSAPGTSESATPESGPGSEPATSGSETPGTSESATPESGPGSEPATSGSETPGTSESATPESGPGTSTEPSEGSAPGSPAGSPTSTEEGTSESATPESGPGSEPATSGSETPGTSESATPESGPGSPAGSPTSTEEGSPAGSPTSTEEGTSTEPSEGSAPGTSESATPESGPGTSESATPESGPGTSESATPESGPGSEPATSGSETPGSEPATSGSETPGSPAGSPTSTEEGTSTEPSEGSAPGTSTEPSEGSAPGSEPATSGSETPGTSESA

SEQ ID NO: 147 - protein, 612 aa, Artificial Sequence
  Description of Artificial Sequence: Synthetic polypeptide
GSETPGTSTEPSEGSAPGTSTEPSEGSAPGTSESATPESGPGTSESATPESGPGSPAGSPTSTEEGTSESATPESGPGSEPATSGSETPGTSESATPESGPGTSTEPSEGSAPGTSTEPSEGSAPGTSTEPSEGSAPGTSTEPSEGSAPGTSTEPSEGSAPGTSTEPSEGSAPGSPAGSPTSTEEGTSTEPSEGSAPGTSESATPESGPGSEPATSGSETPGTSESATPESGPGSEPATSGSETPGTSESATPESGPGTSTEPSEGSAPGTSESATPESGPGSPAGSPTSTEEGSPAGSPTSTEEGSPAGSPTSTEEGTSESATPESGPGTSTEPSEGSAPGTSESATPESGPGSEPATSGSETPGTSESATPESGPGSEPATSGSETPGTSESATPESGPGTSTEPSEGSAPGSPAGSPTSTEEGTSESATPESGPGSEPATSGSETPGTSESATPESGPGSPAGSPTSTEEGSPAGSPTSTEEGTSTEPSEGSAPGTSESATPESGPGTSESATPESGPGTSESATPESGPGSEPATSGSETPGSEPATSGSETPGSPAGSPTSTEEGTSTEPSEGSAPGTSTEPSEGSAPGSEPATSGSETPGTSESAT

SEQ ID NO: 148 - protein, 648 aa, Artificial Sequence
  Description of Artificial Sequence: Synthetic polypeptide
PESGPGTSTEPSEGSAPGTSESATPESGPGSEPATSGSETPGTSTEPSEGSAPGTSTEPSEGSAPGTSESATPESGPGTSESATPESGPGSPAGSPTSTEEGTSESATPESGPGSEPATSGSETPGTSESATPESGPGTSTEPSEGSAPGTSTEPSEGSAPGTSTEPSEGSAPGTSTEPSEGSAPGTSTEPSEGSAPGTSTEPSEGSAPGSPAGSPTSTEEGTSTEPSEGSAPGTSESATPESGPGSEPATSGSETPGTSESATPESGPGSEPATSGSETPGTSESATPESGPGTSTEPSEGSAPGTSESATPESGPGSPAGSPTSTEEGSPAGSPTSTEEGSPAGSPTSTEEGTSESATPESGPGTSTEPSEGSAPGTSESATPESGPGSEPATSGSETPGTSESATPESGPGSEPATSGSETPGTSESATPESGPGTSTEPSEGSAPGSPAGSPTSTEEGTSESATPESGPGSEPATSGSETPGTSESATPESGPGSPAGSPTSTEEGSPAGSPTSTEEGTSTEPSEGSAPGTSESATPESGPGTSESATPESGPGTSESATPESGPGSEPATSGSETPGSEPATSGSETPGSPAGSPTSTEEGTSTEPSEGSAPGTSTEPSEGSAPGSEPATSGSETPGTSESAT

SEQ ID NO: 149 - protein, 684 aa, Artificial Sequence
  Description of Artificial Sequence: Synthetic polypeptide
EGSAPGSPAGSPTSTEEGTSTEPSEGSAPGTSTEPSEGSAPGTSESATPESGPGTSTEPSEGSAPGTSESATPESGPGSEPATSGSETPGTSTEPSEGSAPGTSTEPSEGSAPGTSESATPESGPGTSESATPESGPGSPAGSPTSTEEGTSESATPESGPGSEPATSGSETPGTSESATPESGPGTSTEPSEGSAPGTSTEPSEGSAPGTSTEPSEGSAPGTSTEPSEGSAPGTSTEPSEGSAPGTSTEPSEGSAPGSPAGSPTSTEEGTSTEPSEGSAPGTSESATPESGPGSEPATSGSETPGTSESATPESGPGSEPATSGSETPGTSESATPESGPGTSTEPSEGSAPGTSESATPESGPGSPAGSPTSTEEGSPAGSPTSTEEGSPAGSPTSTEEGTSESATPESGPGTSTEPSEGSAPGTSESATPESGPGSEPATSGSETPGTSESATPESGPGSEPATSGSETPGTSESATPESGPGTSTEPSEGSAPGSPAGSPTSTEEGTSESATPESGPGSEPATSGSETPGTSESATPESGPGSPAGSPTSTEEGSPAGSPTSTEEGTSTEPSEGSAPGTSESATPESGPGTSESATPESGPGTSESATPESGPGSEPATSGSETPGSEPATSGSETPGSPAGSPTSTEEGTSTEPSEGSAPGTSTEPSEGSAPGSEPATS

SEQ ID NO: 150 - protein, 720 aa, Artificial Sequence
  Description of Artificial Sequence: Synthetic polypeptide
TSGSETPGSEPATSGSETPGSPAGSPTSTEEGTSESATPESGPGTSTEPSEGSAPGTSTEPSEGSAPGSPAGSPTSTEEGTSTEPSEGSAPGTSTEPSEGSAPGTSESATPESGPGTSTEPSEGSAPGTSESATPESGPGSEPATSGSETPGTSTEPSEGSAPGTSTEPSEGSAPGTSESATPESGPGTSESATPESGPGSPAGSPTSTEEGTSESATPESGPGSEPATSGSETPGTSESATPESGPGTSTEPSEGSAPGTSTEPSEGSAPGTSTEPSEGSAPGTSTEPSEGSAPGTSTEPSEGSAPGTSTEPSEGSAPGSPAGSPTSTEEGTSTEPSEGSAPGTSESATPESGPGSEPATSGSETPGTSESATPESGPGSEPATSGSETPGTSESATPESGPGTSTEPSEGSAPGTSESATPESGPGSPAGSPTSTEEGSPAGSPTSTEEGSPAGSPTSTEEGTSESATPESGPGTSTEPSEGSAPGTSESATPESGPGSEPATSGSETPGTSESATPESGPGSEPATSGSETPGTSESATPESGPGTSTEPSEGSAPGSPAGSPTSTEEGTSESATPESGPGSEPATSGSETPGTSESATPESGPGSPAGSPTSTEEGSPAGSPTSTEEGTSTEPSEGSAPGTSESATPESGPGTSESATPESGPGTSESATPESGPGSEPATSGSETPGSEPATSGSETPGSPAGSPTSTEEGTSTE

SEQ ID NO: 151 - protein, 756 aa, Artificial Sequence
  Description of Artificial Sequence: Synthetic polypeptide
TSGSETPGSEPATSGSETPGSPAGSPTSTEEGTSESATPESGPGTSTEPSEGSAPGTSTEPSEGSAPGSPAGSPTSTEEGTSTEPSEGSAPGTSTEPSEGSAPGTSESATPESGPGTSTEPSEGSAPGTSESATPESGPGSEPATSGSETPGTSTEPSEGSAPGTSTEPSEGSAPGTSESATPESGPGTSESATPESGPGSPAGSPTSTEEGTSESATPESGPGSEPATSGSETPGTSESATPESGPGTSTEPSEGSAPGTSTEPSEGSAPGTSTEPSEGSAPGTSTEPSEGSAPGTSTEPSEGSAPGTSTEPSEGSAPGSPAGSPTSTEEGTSTEPSEGSAPGTSESATPESGPGSEPATSGSETPGTSESATPESGPGSEPATSGSETPGTSESATPESGPGTSTEPSEGSAPGTSESATPESGPGSPAGSPTSTEEGSPAGSPTSTEEGSPAGSPTSTEEGTSESATPESGPGTSTEPSEGSAPGTSESATPESGPGSEPATSGSETPGTSESATPESGPGSEPATSGSETPGTSESATPESGPGTSTEPSEGSAPGSPAGSPTSTEEGTSESATPESGPGSEPATSGSETPGTSESATPESGPGSPAGSPTSTEEGSPAGSPTSTEEGTSTEPSEGSAPGTSESATPESGPGTSESATPESGPGTSESATPESGPGSEPATSGSETPGSEPATSGSETPGSPAGSPTSTEEGTSTEPSEGSAPGTSTEPSEGSAPGSEPATSGSETPGTSES

SEQ ID NO: 152 - protein, 792 aa, Artificial Sequence
  Description of Artificial Sequence: Synthetic polypeptide
EGSAPGTSESATPESGPGSEPATSGSETPGSEPATSGSETPGSPAGSPTSTEEGTSESATPESGPGTSTEPSEGSAPGTSTEPSEGSAPGSPAGSPTSTEEGTSTEPSEGSAPGTSTEPSEGSAPGTSESATPESGPGTSTEPSEGSAPGTSESATPESGPGSEPATSGSETPGTSTEPSEGSAPGTSTEPSEGSAPGTSESATPESGPGTSESATPESGPGSPAGSPTSTEEGTSESATPESGPGSEPATSGSETPGTSESATPESGPGTSTEPSEGSAPGTSTEPSEGSAPGTSTEPSEGSAPGTSTEPSEGSAPGTSTEPSEGSAPGTSTEPSEGSAPGSPAGSPTSTEEGTSTEPSEGSAPGTSESATPESGPGSEPATSGSETPGTSESATPESGPGSEPATSGSETPGTSESATPESGPGTSTEPSEGSAPGTSESATPESGPGSPAGSPTSTEEGSPAGSPTSTEEGSPAGSPTSTEEGTSESATPESGPGTSTEPSEGSAPGTSESATPESGPGSEPATSGSETPGTSESATPESGPGSEPATSGSETPGTSESATPESGPGTSTEPSEGSAPGSPAGSPTSTEEGTSESATPESGPGSEPATSGSETPGTSESATPESGPGSPAGSPTSTEEGSPAGSPTSTEEGTSTEPSEGSAPGTSESATPESGPGTSESATPESGPGTSESATPESGPGSEPATSGSETPGSEPATSGSETPGSPAGSPTSTEEGTSTEPSEGSAPGTSTEPSEGSAPGSEPATSGSETPGTSESATPESGPGTSTEPS

SEQ ID NO: 153 - protein, 828 aa, Artificial Sequence
  Description of Artificial Sequence: Synthetic polypeptide
PESGPGTSTEPSEGSAPGSPAGSPTSTEEGTSTEPSEGSAPGTSTEPSEGSAPGTSESATPESGPGSEPATSGSETPGSEPATSGSETPGSPAGSPTSTEEGTSESATPESGPGTSTEPSEGSAPGTSTEPSEGSAPGSPAGSPTSTEEGTSTEPSEGSAPGTSTEPSEGSAPGTSESATPESGPGTSTEPSEGSAPGTSESATPESGPGSEPATSGSETPGTSTEPSEGSAPGTSTEPSEGSAPGTSESATPESGPGTSESATPESGPGSPAGSPTSTEEGTSESATPESGPGSEPATSGSETPGTSESATPESGPGTSTEPSEGSAPGTSTEPSEGSAPGTSTEPSEGSAPGTSTEPSEGSAPGTSTEPSEGSAPGTSTEPSEGSAPGSPAGSPTSTEEGTSTEPSEGSAPGTSESATPESGPGSEPATSGSETPGTSESATPESGPGSEPATSGSETPGTSESATPESGPGTSTEPSEGSAPGTSESATPESGPGSPAGSPTSTEEGSPAGSPTSTEEGSPAGSPTSTEEGTSESATPESGPGTSTEPSEGSAPGTSESATPESGPGSEPATSGSETPGTSESATPESGPGSEPATSGSETPGTSESATPESGPGTSTEPSEGSAPGSPAGSPTSTEEGTSESATPESGPGSEPATSGSETPGTSESATPESGPGSPAGSPTSTEEGSPAGSPTSTEEGTSTEPSEGSAPGTSESATPESGPGTSESATPESGPGTSESATPESGPGSEPATSGSETPGSEPATSGSETPGSPAGSPTSTEEGTSTEPSEGSAPGTSTEPSEGSAPGSEPATSGSETPGTSESAT

SEQ ID NO: 154 - protein, 72 aa, Artificial Sequence
  Description of Artificial Sequence: Synthetic polypeptide
GPGSSPSASTGTGPGTPGSGTASSSPGSSTPSGATGSPGSSPSASTGTGPGASPGTSSTGSPGTPGSGTASS

SEQ ID NO: 155 - protein, 72 aa, Artificial Sequence
  Description of Artificial Sequence: Synthetic polypeptide
GSSTPSGATGSPGSSTPSGATGSPGSSPSASTGTGPGSSPSASTGTGPGASPGTSSTGSPGTPGSGTASSSP

SEQ ID NO: 156 - protein, 72 aa, Artificial Sequence
  Description of Artificial Sequence: Synthetic polypeptide
SPSASTGTGPGASPGTSSTGSPGSSPSASTGTGPGTPGSGTASSSPGSSTPSGATGSPGSSTPSGATGSPGA

SEQ ID NO: 157 - protein, 108 aa, Artificial Sequence
  Description of Artificial Sequence: Synthetic polypeptide
SASTGTGPGSSPSASTGTGPGTPGSGTASSSPGSSTPSGATGSPGSSPSASTGTGPGASPGTSSTGSPGTPGSGTASSSPGSSTPSGATGSPGTPGSGTASSSPGASP

SEQ ID NO: 158 - protein, 108 aa, Artificial Sequence
  Description of Artificial Sequence: Synthetic polypeptide
PGTPGSGTASSSPGSSTPSGATGSPGTPGSGTASSSPGSSTPSGATGSPGSSTPSGATGSPGSSPSASTGTGPGSSPSASTGTGPGASPGTSSTGSPGTPGSGTASSS

SEQ ID NO: 159 - protein, 144 aa, Artificial Sequence; identical to SEQ ID NO: 77
  Description of Artificial Sequence: Synthetic polypeptide

SEQ ID NO: 160 - protein, 144 aa, Artificial Sequence
  Description of Artificial Sequence: Synthetic polypeptide
PSGATGSPGTPGSGTASSSPGSSTPSGATGSPGSSTPSGATGSPGSSPSASTGTGPGSSPSASTGTGPGASPGTSSTGSPGTPGSGTASSSPGSSTPSGATGSPGSSPSASTGTGPGSSPSASTGTGPGASPGTSSTGSPGASP

SEQ ID NO: 161 - protein, 180 aa, Artificial Sequence
  Description of Artificial Sequence: Synthetic polypeptide
TSSTGSPGSSPSASTGTGPGSSPSASTGTGPGTPGSGTASSSPGSSTPSGATGSPGSSPSASTGTGPGASPGTSSTGSPGTPGSGTASSSPGSSTPSGATGSPGTPGSGTASSSPGASPGTSSTGSPGASPGTSSTGSPGTPGSGTASSSPGSSTPSGATGSPGASPGTSSTGSPGTPGS

SEQ ID NO: 162 - protein, 216 aa, Artificial Sequence
  Description of Artificial Sequence: Synthetic polypeptide
TGTGPGSSPSASTGTGPGTPGSGTASSSPGSSTPSGATGSPGSSPSASTGTGPGASPGTSSTGSPGTPGSGTASSSPGSSTPSGATGSPGTPGSGTASSSPGASPGTSSTGSPGASPGTSSTGSPGTPGSGTASSSPGSSTPSGATGSPGASPGTSSTGSPGTPGSGTASSSPGSSTPSGATGSPGSSPSASTGTGPGSSPSASTGTGPGSSTPSG

SEQ ID NO: 163 - protein, 252 aa, Artificial Sequence
  Description of Artificial Sequence: Synthetic polypeptide
TSSTGSPGSSPSASTGTGPGSSPSASTGTGPGTPGSGTASSSPGSSTPSGATGSPGSSPSASTGTGPGASPGTSSTGSPGTPGSGTASSSPGSSTPSGATGSPGTPGSGTASSSPGASPGTSSTGSPGASPGTSSTGSPGTPGSGTASSSPGSSTPSGATGSPGASPGTSSTGSPGTPGSGTASSSPGSSTPSGATGSPGSSPSASTGTGPGSSPSASTGTGPGSSTPSGATGSPGSSTPSGATGSPGASPG

SEQ ID NO: 164 - protein, 288 aa, Artificial Sequence
  Description of Artificial Sequence: Synthetic polypeptide
TSSTGSPGSSPSASTGTGPGSSPSASTGTGPGTPGSGTASSSPGSSTPSGATGSPGSSPSASTGTGPGASPGTSSTGSPGTPGSGTASSSPGSSTPSGATGSPGTPGSGTASSSPGASPGTSSTGSPGASPGTSSTGSPGTPGSGTASSSPGSSTPSGATGSPGASPGTSSTGSPGTPGSGTASSSPGSSTPSGATGSPGSSPSASTGTGPGSSPSASTGTGPGSSTPSGATGSPGSSTPSGATGSPGASPGTSSTGSPGASPGTSSTGSPGASPGTSSTGSPGTPGS

SEQ ID NO: 165 - protein, 324 aa, Artificial Sequence
  Description of Artificial Sequence: Synthetic polypeptide
TSSTGSPGTPGSGTASSSPGASPGTSSTGSPGASPGTSSTGSPGASPGTSSTGSPGASPGTSSTGSPGTPGSGTASSSPGSSTPSGATGSPGTPGSGTASSSPGSSTPSGATGSPGTPGSGTASSSPGSSTPSGATGSPGSSTPSGATGSPGSSPSASTGTGPGSSPSASTGTGPGASPGTSSTGSPGTPGSGTASSSPGSSTPSGATGSPGSSPSASTGTGPGSSPSASTGTGPGASPGTSSTGSPGASPGTSSTGSPGSSTPSGATGSPGSSPSASTGTGPGASPGTSSTGSPGSSPSASTGTGPGTPGSGTASSSPGSSTP

SEQ ID NO: 166 - protein, 360 aa, Artificial Sequence
  Description of Artificial Sequence: Synthetic polypeptide
TSSTGSPGASPGTSSTGSPGTPGSGTASSSPGASPGTSSTGSPGASPGTSSTGSPGASPGTSSTGSPGASPGTSSTGSPGTPGSGTASSSPGSSTPSGATGSPGTPGSGTASSSPGSSTPSGATGSPGTPGSGTASSSPGSSTPSGATGSPGSSTPSGATGSPGSSPSASTGTGPGSSPSASTGTGPGASPGTSSTGSPGTPGSGTASSSPGSSTPSGATGSPGSSPSASTGTGPGSSPSASTGTGPGASPGTSSTGSPGASPGTSSTGSPGSSTPSGATGSPGSSPSASTGTGPGASPGTSSTGSPGSSPSASTGTGPGTPGSGTASSSPGSSTPSGATGSPGSSTPSGATGSPGASPG

SEQ ID NO: 167 - protein, 396 aa, Artificial Sequence
  Description of Artificial Sequence: Synthetic polypeptide
GATGSPGSSTPSGATGSPGSSPSASTGTGPGASPGTSSTGSPGASPGTSSTGSPGTPGSGTASSSPGASPGTSSTGSPGASPGTSSTGSPGASPGTSSTGSPGASPGTSSTGSPGTPGSGTASSSPGSSTPSGATGSPGTPGSGTASSSPGSSTPSGATGSPGTPGSGTASSSPGSSTPSGATGSPGSSTPSGATGSPGSSPSASTGTGPGSSPSASTGTGPGASPGTSSTGSPGTPGSGTASSSPGSSTPSGATGSPGSSPSASTGTGPGSSPSASTGTGPGASPGTSSTGSPGASPGTSSTGSPGSSTPSGATGSPGSSPSASTGTGPGASPGTSSTGSPGSSPSASTGTGPGTPGSGTASSSPGSSTPSGATGSPGSSTPSGATGSPGASPGT

SEQ ID NO: 168 - protein, 432 aa, Artificial Sequence
  Description of Artificial Sequence: Synthetic polypeptide
GATGSPGSSTPSGATGSPGASPGTSSTGSPGTPGSGTASSSPGSSTPSGATGSPGSSTPSGATGSPGSSTPSGATGSPGSSPSASTGTGPGASPGTSSTGSPGASPGTSSTGSPGTPGSGTASSSPGASPGTSSTGSPGASPGTSSTGSPGASPGTSSTGSPGASPGTSSTGSPGTPGSGTASSSPGSSTPSGATGSPGTPGSGTASSSPGSSTPSGATGSPGTPGSGTASSSPGSSTPSGATGSPGSSTPSGATGSPGSSPSASTGTGPGSSPSASTGTGPGASPGTSSTGSPGTPGSGTASSSPGSSTPSGATGSPGSSPSASTGTGPGSSPSASTGTGPGASPGTSSTGSPGASPGTSSTGSPGSSTPSGATGSPGSSPSASTGTGPGASPGTSSTGSPGSSPSASTGTGPGTPGSGTASSSPGSSTPS

SEQ ID NO: 169 - protein, 468 aa, Artificial Sequence
  Description of Artificial Sequence: Synthetic polypeptide
TSSTGSPGSSPSASTGTGPGTPGSGTASSSPGASPGTSSTGSPGASPGTSSTGSPGASPGTSSTGSPGSSTPSGATGSPGSSTPSGATGSPGASPGTSSTGSPGTPGSGTASSSPGSSTPSGATGSPGSSTPSGATGSPGSSTPSGATGSPGSSPSASTGTGPGASPGTSSTGSPGASPGTSSTGSPGTPGSGTASSSPGASPGTSSTGSPGASPGTSSTGSPGASPGTSSTGSPGASPGTSSTGSPGTPGSGTASSSPGSSTPSGATGSPGTPGSGTASSSPGSSTPSGATGSPGTPGSGTASSSPGSSTPSGATGSPGSSTPSGATGSPGSSPSASTGTGPGSSPSASTGTGPGASPGTSSTGSPGTPGSGTASSSPGSSTPSGATGSPGSSPSASTGTGPGSSPSASTGTGPGASPGTSSTGSPGASPGTSSTGSPGSSTPSGATGSPGSSPSASTGTGPGASPG

SEQ ID NO: 170 - protein, 504 aa, Artificial Sequence
  Description of Artificial Sequence: Synthetic polypeptide
TSSTGSPGSSPSASTGTGPGTPGSGTASSSPGASPGTSSTGSPGASPGTSSTGSPGASPGTSSTGSPGSSTPSGATGSPGSSTPSGATGSPGASPGTSSTGSPGTPGSGTASSSPGSSTPSGATGSPGSSTPSGATGSPGSSTPSGATGSPGSSPSASTGTGPGASPGTSSTGSPGASPGTSSTGSPGTPGSGTASSSPGASPGTSSTGSPGASPGTSSTGSPGASPGTSSTGSPGASPGTSSTGSPGTPGSGTASSSPGSSTPSGATGSPGTPGSGTASSSPGSSTPSGATGSPGTPGSGTASSSPGSSTPSGATGSPGSSTPSGATGSPGSSPSASTGTGPGSSPSASTGTGPGASPGTSSTGSPGTPGSGTASSSPGSSTPSGATGSPGSSPSASTGTGPGSSPSASTGTGPGASPGTSSTGSPGASPGTSSTGSPGSSTPSGATGSPGSSPSASTGTGPGASPGTSSTGSPGSSPSASTGTGPGTPGSGTASSSPGSSTP

SEQ ID NO: 171 - protein, 540 aa, Artificial Sequence
  Description of Artificial Sequence: Synthetic polypeptide
TSSTGSPGASPGTSSTGSPGSSPSASTGTGPGTPGSGTASSSPGASPGTSSTGSPGASPGTSSTGSPGASPGTSSTGSPGSSTPSGATGSPGSSTPSGATGSPGASPGTSSTGSPGTPGSGTASSSPGSSTPSGATGSPGSSTPSGATGSPGSSTPSGATGSPGSSPSASTGTGPGASPGTSSTGSPGASPGTSSTGSPGTPGSGTASSSPGASPGTSSTGSPGASPGTSSTGSPGASPGTSSTGSPGASPGTSSTGSPGTPGSGTASSSPGSSTPSGATGSPGTPGSGTASSSPGSSTPSGATGSPGTPGSGTASSSPGSSTPSGATGSPGSSTPSGATGSPGSSPSASTGTGPGSSPSASTGTGPGASPGTSSTGSPGTPGSGTASSSPGSSTPSGATGSPGSSPSASTGTGPGSSPSASTGTGPGASPGTSSTGSPGASPGTSSTGSPGSSTPSGATGSPGSSPSASTGTGPGASPGTSSTGSPGSSPSASTGTGPGTPGSGTASSSPGSSTPSGATGSPGSSTPSGATGSPGASPG

SEQ ID NO: 172 - protein, 576 aa, Artificial Sequence
  Description of Artificial Sequence: Synthetic polypeptide
TSSTGSPGTPGSGTASSSPGASPGTSSTGSPGASPGTSSTGSPGASPGTSSTGSPGSSPSASTGTGPGTPGSGTASSSPGASPGTSSTGSPGASPGTSSTGSPGASPGTSSTGSPGSSTPSGATGSPGSSTPSGATGSPGASPGTSSTGSPGTPGSGTASSSPGSSTPSGATGSPGSSTPSGATGSPGSSTPSGATGSPGSSPSASTGTGPGASPGTSSTGSPGASPGTSSTGSPGTPGSGTASSSPGASPGTSSTGSPGASPGTSSTGSPGASPGTSSTGSPGASPGTSSTGSPGTPGSGTASSSPGSSTPSGATGSPGTPGSGTASSSPGSSTPSGATGSPGTPGSGTASSSPGSSTPSGATGSPGSSTPSGATGSPGSSPSASTGTGPGSSPSASTGTGPGASPGTSSTGSPGTPGSGTASSSPGSSTPSGATGSPGSSPSASTGTGPGSSPSASTGTGPGASPGTSSTGSPGASPGTSSTGSPGSSTPSGATGSPGSSPSASTGTGPGASPGTSSTGSPGSSPSASTGTGPGTPGSGTASSSPGSSTPSGATGSPGSSTPSGATGSPGASPG

SEQ ID NO: 173 - protein, 612 aa, Artificial Sequence
  Description of Artificial Sequence: Synthetic polypeptide
STGSPGTPGSGTASSSPGSSTPSGATGSPGASPGTSSTGSPGTPGSGTASSSPGSSTPSGATGSPGSSPSASTGTGPGSSPSASTGTGPGSSTPSGATGSPGSSTPSGATGSPGASPGTSSTGSPGASPGTSSTGSPGASPGTSSTGSPGTPGSGTASSSPGASPGTSSTGSPGASPGTSSTGSPGASPGTSSTGSPGSSPSASTGTGPGTPGSGTASSSPGASPGTSSTGSPGASPGTSSTGSPGASPGTSSTGSPGSSTPSGATGSPGSSTPSGATGSPGASPGTSSTGSPGTPGSGTASSSPGSSTPSGATGSPGSSTPSGATGSPGSSTPSGATGSPGSSPSASTGTGPGASPGTSSTGSPGASPGTSSTGSPGTPGSGTASSSPGASPGTSSTGSPGASPGTSSTGSPGASPGTSSTGSPGASPGTSSTGSPGTPGSGTASSSPGSSTPSGATGSPGTPGSGTASSSPGSSTPSGATGSPGTPGSGTASSSPGSSTPSGATGSPGSSTPSGATGSPGSSPSASTGTGPGSSPSASTGTGPGASPGTSSTGSPGTPGSGTASSSPGSSTPSGATGSPGSSPSASTGTGPGSSPSASTGTGPGASPGTS

SEQ ID NO: 174 - protein, 648 aa, Artificial Sequence
  Description of Artificial Sequence: Synthetic polypeptide
GTASSSPGSSTPSGATGSPGSSPSASTGTGPGSSPSASTGTGPGSSTPSGATGSPGSSTPSGATGSPGASPGTSSTGSPGASPGTSSTGSPGASPGTSSTGSPGTPGSGTASSSPGASPGTSSTGSPGASPGTSSTGSPGASPGTSSTGSPGSSPSASTGTGPGTPGSGTASSSPGASPGTSSTGSPGASPGTSSTGSPGASPGTSSTGSPGSSTPSGATGSPGSSTPSGATGSPGASPGTSSTGSPGTPGSGTASSSPGSSTPSGATGSPGSSTPSGATGSPGSSTPSGATGSPGSSPSASTGTGPGASPGTSSTGSPGASPGTSSTGSPGTPGSGTASSSPGASPGTSSTGSPGASPGTSSTGSPGASPGTSSTGSPGASPGTSSTGSPGTPGSGTASSSPGSSTPSGATGSPGTPGSGTASSSPGSSTPSGATGSPGTPGSGTASSSPGSSTPSGATGSPGSSTPSGATGSPGSSPSASTGTGPGSSPSASTGTGPGASPGTSSTGSPGTPGSGTASSSPGSSTPSGATGSPGSSPSASTGTGPGSSPSASTGTGPGASPGTSSTGSPGASPGTSSTGSPGSSTPSGATGSPGSSPSASTGTGPGASPGTSSTGSPGSSPSASTGTGPGTPGSGTASSSPGSSTP

SEQ ID NO: 175 - protein, 684 aa, Artificial Sequence
  Description of Artificial Sequence: Synthetic polypeptide
TSSTGSPGTPGSGTASSSPGSSTPSGATGSPGSSPSASTGTGPGSSPSASTGTGPGSSTPSGATGSPGSSTPSGATGSPGASPGTSSTGSPGASPGTSSTGSPGASPGTSSTGSPGTPGSGTASSSPGASPGTSSTGSPGASPGTSSTGSPGASPGTSSTGSPGSSPSASTGTGPGTPGSGTASSSPGASPGTSSTGSPGASPGTSSTGSPGASPGTSSTGSPGSSTPSGATGSPGSSTPSGATGSPGASPGTSSTGSPGTPGSGTASSSPGSSTPSGATGSPGSSTPSGATGSPGSSTPSGATGSPGSSPSASTGTGPGASPGTSSTGSPGASPGTSSTGSPGTPGSGTASSSPGASPGTSSTGSPGASPGTSSTGSPGASPGTSSTGSPGASPGTSSTGSPGTPGSGTASSSPGSSTPSGATGSPGTPGSGTASSSPGSSTPSGATGSPGTPGSGTASSSPGSSTPSGATGSPGSSTPSGATGSPGSSPSASTGTGPGSSPSASTGTGPGASPGTSSTGSPGTPGSGTASSSPGSSTPSGATGSPGSSPSASTGTGPGSSPSASTGTGPGASPGTSSTGSPGASPGTSSTGSPGSSTPSGATGSPGSSPSASTGTGPGASPGTSSTGSPGSSPSASTGTGPGTPGSGTASSSPGSSTPSGATGSPGSSTPSGATGSPGASPG

SEQ ID NO: 176 - protein, 720 aa, Artificial Sequence
  Description of Artificial Sequence: Synthetic polypeptide
TSSTGSPGTPGSGTASSSPGSSTPSGATGSPGASPGTSSTGSPGTPGSGTASSSPGSSTPSGATGSPGSSPSASTGTGPGSSPSASTGTGPGSSTPSGATGSPGSSTPSGATGSPGASPGTSSTGSPGASPGTSSTGSPGASPGTSSTGSPGTPGSGTASSSPGASPGTSSTGSPGASPGTSSTGSPGASPGTSSTGSPGSSPSASTGTGPGTPGSGTASSSPGASPGTSSTGSPGASPGTSSTGSPGASPGTSSTGSPGSSTPSGATGSPGSSTPSGATGSPGASPGTSSTGSPGTPGSGTASSSPGSSTPSGATGSPGSSTPSGATGSPGSSTPSGATGSPGSSPSASTGTGPGASPGTSSTGSPGASPGTSSTGSPGTPGSGTASSSPGASPGTSSTGSPGASPGTSSTGSPGASPGTSSTGSPGASPGTSSTGSPGTPGSGTASSSPGSSTPSGATGSPGTPGSGTASSSPGSSTPSGATGSPGTPGSGTASSSPGSSTPSGATGSPGSSTPSGATGSPGSSPSASTGTGPGSSPSASTGTGPGASPGTSSTGSPGTPGSGTASSSPGSSTPSGATGSPGSSPSASTGTGPGSSPSASTGTGPGASPGTSSTGSPGASPGTSSTGSPGSSTPSGATGSPGSSPSASTGTGPGASPGTSSTGSPGSSPSASTGTGPGTPGSGTASSSPGSSTPSGATGSPGSSTPSGATGSPGASPG

SEQ ID NO: 177 - protein, 756 aa, Artificial Sequence
  Description of Artificial Sequence: Synthetic polypeptide
TSSTGSPGSSPSASTGTGPGSSPSASTGTGPGTPGSGTASSSPGSSTPSGATGSPGSSPSASTGTGPGASPGTSSTGSPGTPGSGTASSSPGSSTPSGATGSPGTPGSGTASSSPGASPGTSSTGSPGASPGTSSTGSPGTPGSGTASSSPGSSTPSGATGSPGASPGTSSTGSPGTPGSGTASSSPGSSTPSGATGSPGSSPSASTGTGPGSSPSASTGTGPGSSTPSGATGSPGSSTPSGATGSPGASPGTSSTGSPGASPGTSSTGSPGASPGTSSTGSPGTPGSGTASSSPGASPGTSSTGSPGASPGTSSTGSPGASPGTSSTGSPGSSPSASTGTGPGTPGSGTASSSPGASPGTSSTGSPGASPGTSSTGSPGASPGTSSTGSPGSSTPSGATGSPGSSTPSGATGSPGASPGTSSTGSPGTPGSGTASSSPGSSTPSGATGSPGSSTPSGATGSPGSSTPSGATGSPGSSPSASTGTGPGASPGTSSTGSPGASPGTSSTGSPGTPGSGTASSSPGASPGTSSTGSPGASPGTSSTGSPGASPGTSSTGSPGASPGTSSTGSPGTPGSGTASSSPGSSTPSGATGSPGTPGSGTASSSPGSSTPSGATGSPGTPGSGTASSSPGSSTPSGATGSPGSSTPSGATGSPGSSPSASTGTGPGSSPSASTGTGPGASPGTSSTGSPGTPGSGTASSSPGSSTPSGATGSPGSSPSASTGTGPGSSPSASTGTGPGASPGTSSTGSPGASPG

SEQ ID NO: 178 - protein, 792 aa, Artificial Sequence
  Description of Artificial Sequence: Synthetic polypeptide
TSSTGSPGSSPSASTGTGPGSSPSASTGTGPGTPGSGTASSSPGSSTPSGATGSPGSSPSASTGTGPGASPGTSSTGSPGTPGSGTASSSPGSSTPSGATGSPGTPGSGTASSSPGASPGTSSTGSPGASPGTSSTGSPGTPGSGTASSSPGSSTPSGATGSPGASPGTSSTGSPGTPGSGTASSSPGSSTPSGATGSPGSSPSASTGTGPGSSPSASTGTGPGSSTPSGATGSPGSSTPSGATGSPGASPGTSSTGSPGASPGTSSTGSPGASPGTSSTGSPGTPGSGTASSSPGASPGTSSTGSPGASPGTSSTGSPGASPGTSSTGSPGSSPSASTGTGPGTPGSGTASSSPGASPGTSSTGSPGASPGTSSTGSPGASPGTSSTGSPGSSTPSGATGSPGSSTPSGATGSPGASPGTSSTGSPGTPGSGTASSSPGSSTPSGATGSPGSSTPSGATGSPGSSTPSGATGSPGSSPSASTGTGPGASPGTSSTGSPGASPGTSSTGSPGTPGSGTASSSPGASPGTSSTGSPGASPGTSSTGSPGASPGTSSTGSPGASPGTSSTGSPGTPGSGTASSSPGSSTPSGATGSPGTPGSGTASSSPGSSTPSGATGSPGTPGSGTASSSPGSSTPSGATGSPGSSTPSGATGSPGSSPSASTGTGPGSSPSASTGTGPGASPGTSSTGSPGTPGSGTASSSPGSSTPSGATGSPGSSPSASTGTGPGSSPSASTGTGPGASPGTSSTGSPGASPGTSSTGSPGSSTPSGATGSPGSSPSASTGTGPGASPG

SEQ ID NO: 179 - protein, 828 aa, Artificial Sequence
  Description of Artificial Sequence: Synthetic polypeptide
TSSTGSPGSSPSASTGTGPGSSPSASTGTGPGTPGSGTASSSPGSSTPSGATGSPGSSPSASTGTGPGASPGTSSTGSPGTPGSGTASSSPGSSTPSGATGSPGTPGSGTASSSPGASPGTSSTGSPGASPGTSSTGSPGTPGSGTASSSPGSSTPSGATGSPGASPGTSSTGSPGTPGSGTASSSPGSSTPSGATGSPGSSPSASTGTGPGSSPSASTGTGPGSSTPSGATGSPGSSTPSGATGSPGASPGTSSTGSPGASPGTSSTGSPGASPGTSSTGSPGTPGSGTASSSPGASPGTSSTGSPGASPGTSSTGSPGASPGTSSTGSPGSSPSASTGTGPGTPGSGTASSSPGASPGTSSTGSPGASPGTSSTGSPGASPGTSSTGSPGSSTPSGATGSPGSSTPSGATGSPGASPGTSSTGSPGTPGSGTASSSPGSSTPSGATGSPGSSTPSGATGSPGSSTPSGATGSPGSSPSASTGTGPGASPGTSSTGSPGASPGTSSTGSPGTPGSGTASSSPGASPGTSSTGSPGASPGTSSTGSPGASPGTSSTGSPGASPGTSSTGSPGTPGSGTASSSPGSSTPSGATGSPGTPGSGTASSSPGSSTPSGATGSPGTPGSGTASSSPGSSTPSGATGSPGSSTPSGATGSPGSSPSASTGTGPGSSPSASTGTGPGASPGTSSTGSPGTPGSGTASSSPGSSTPSGATGSPGSSPSASTGTGPGSSPSASTGTGPGASPGTSSTGSPGASPGTSSTGSPGSSTPSGATGSPGSSPSASTGTGPGASPGTSSTGSPGSSPSASTGTGPGTPGSGTASSSPGSSTP

SEQ ID NO: 180 - protein, 288 aa, Artificial Sequence
  Description of Artificial Sequence: Synthetic polypeptide
GTPGSGTASSSPGSSTPSGATGSPGSSTPSGATGSPGSSTPSGATGSPGSSPSASTGTGPGASPGTSSTGSPGASPGTSSTGSPGTPGSGTASSSPGASPGTSSTGSPGASPGTSSTGSPGASPGTSSTGSPGASPGTSSTGSPGTPGSGTASSSPGSSTPSGATGSPGTPGSGTASSSPGSSTPSGATGSPGTPGSGTASSSPGSSTPSGATGSPGSSTPSGATGSPGSSPSASTGTGPGSSPSASTGTGPGASPGTSSTGSPGTPGSGTASSSPGSSTPSGATGSP

SEQ ID NO: 181 - protein, 4 aa, Artificial Sequence
  Description of Artificial Sequence: Synthetic peptide
GSPG

SEQ ID NO: 182 - protein, 4 aa, Artificial Sequence
  Description of Artificial Sequence: Synthetic peptide
ETET

SEQ ID NO: 183 - protein, 5 aa, Artificial Sequence
  Description of Artificial Sequence: Synthetic peptide
PGSSS

SEQ ID NO: 184 - protein, 5 aa, Artificial Sequence
  Description of Artificial Sequence: Synthetic peptide
GPSGP

SEQ ID NO: 185 - protein, 10 aa, Artificial Sequence
  Description of Artificial Sequence: Synthetic peptide
GAGSPGAETA

SEQ ID NO: 186 - protein, 7 aa, Artificial Sequence
  Description of Artificial Sequence: Synthetic peptide
KLTRAET

SEQ ID NO: 187 - protein, 7 aa, Artificial Sequence
  Description of Artificial Sequence: Synthetic peptide
DFTRVVG

SEQ ID NO: 188 - protein, 8 aa, Artificial Sequence
  Description of Artificial Sequence: Synthetic peptide
TMTRIVGG

SEQ ID NO: 189 - protein, 8 aa, Artificial Sequence
  Description of Artificial Sequence: Synthetic peptide
SPFRSTGG

SEQ ID NO: 190 - protein, 8 aa, Artificial Sequence
  Description of Artificial Sequence: Synthetic peptide
LQVRIVGG

SEQ ID NO: 191 - protein, 8 aa, Artificial Sequence
  Description of Artificial Sequence: Synthetic peptide
PLGRIVGG

SEQ ID NO: 192 - protein, 8 aa, Artificial Sequence
  Description of Artificial Sequence: Synthetic peptide
IEGRTVGG

SEQ ID NO: 193 - protein, 8 aa, Artificial Sequence
  Description of Artificial Sequence: Synthetic peptide
LTPRSLLV

SEQ ID NO: 194 - protein, 8 aa, Artificial Sequence
  Description of Artificial Sequence: Synthetic peptide
LGPVSGVP

SEQ ID NO: 195 - protein, 8 aa, Artificial Sequence
  Description of Artificial Sequence: Synthetic peptide
VAGDSLEE

SEQ ID NO: 196 - protein, 8 aa, Artificial Sequence
  Description of Artificial Sequence: Synthetic peptide
GPAGLGGA

SEQ ID NO: 197 - protein, 8 aa, Artificial Sequence
  Description of Artificial Sequence: Synthetic peptide
  MOD_RES (2)..(2): Pro or Ala
  MOD_RES (3)..(3): Any amino acid
  MOD_RES (6)..(6): Any amino acid
  MOD_RES (8)..(8): Any amino acid
GXXGLXGX

SEQ ID NO: 198 - protein, 8 aa, Artificial Sequence
  Description of Artificial Sequence: Synthetic peptide
GPAGLRGA

SEQ ID NO: 199 - protein, 8 aa, Artificial Sequence
  Description of Artificial Sequence: Synthetic peptide
  MOD_RES (3)..(3): Any amino acid
  MOD_RES (6)..(6): Any amino acid
  MOD_RES (7)..(7): Gly or Ala
  MOD_RES (8)..(8): Any amino acid
GPXGLXXX

SEQ ID NO: 200 - protein, 8 aa, Artificial Sequence
  Description of Artificial Sequence: Synthetic peptide
APLGLRLR

SEQ ID NO: 201 - protein, 8 aa, Artificial Sequence
  Description of Artificial Sequence: Synthetic peptide
PALPLVAQ

SEQ ID NO: 202 - protein, 7 aa, Artificial Sequence
  Description of Artificial Sequence: Synthetic peptide
ENLYFQG

SEQ ID NO: 203 - protein, 8 aa, Artificial Sequence
  Description of Artificial Sequence: Synthetic peptide
ENLYFQGS

SEQ ID NO: 204 - protein, 8 aa, Artificial Sequence
  Description of Artificial Sequence: Synthetic peptide
DDDKIVGG

SEQ ID NO: 205 - protein, 8 aa, Artificial Sequence
  Description of Artificial Sequence: Synthetic peptide
DDDKIVGG

SEQ ID NO: 206 - protein, 8 aa, Artificial Sequence
  Description of Artificial Sequence: Synthetic peptide
LEVLFQGP

SEQ ID NO: 207 - protein, 8 aa, Artificial Sequence
  Description of Artificial Sequence: Synthetic peptide
LEVLFQGP

SEQ ID NO: 208 - protein, 8 aa, Artificial Sequence
  Description of Artificial Sequence: Synthetic peptide
LPKTGSES

SEQ ID NO: 209 - protein, 8 aa, Artificial Sequence
  Description of Artificial Sequence: Synthetic peptide
  MOD_RES (3)..(3): Lys, Glu, Ala or Asp
  MOD_RES (6)..(6): Any amino acid
  MOD_RES (7)..(7): Glu, Lys or Ser
LPXTGXXS

SEQ ID NO: 210 - DNA, 144 bp, Artificial Sequence
  Description of Artificial Sequence: Synthetic polynucleotide
atggctgaacctgctggctctccaacctccactgaggaaggtaccccgggtagcggtactgcttcttcctctccaggtagctctaccccttctggtgcaaccggctctccaggtgcttctccgggcaccagctctaccggttct

SEQ ID NO: 211 - DNA, 144 bp, Artificial Sequence
  Description of Artificial Sequence: Synthetic polynucleotide
atggctgaacctgctggctctccaacctccactgaggaaggtgcatccccgggcaccagctctaccggttctccaggtagctctaccccgtctggtgctaccggctctccaggtagctctaccccgtctggtgctactggctct

SEQ ID NO: 212 - DNA, 432 bp, Artificial Sequence
  Description of Artificial Sequence: Synthetic polynucleotide
ggtagcgaaccggcaacttccggctctgaaaccccaggtacttctgaaagcgctactcctgagtctggcccaggtagcgaacctgctacctctggctctgaaaccccaggtagcccggcaggctctccgacttccaccgaggaaggtacctctactgaaccttctgagggtagcgctccaggtagcgaaccggcaacctctggctctgaaaccccaggtagcgaacctgctacctccggctctgaaactccaggtagcgaaccggctacttccggttctgaaactccaggtacctctaccgaaccttccgaaggcagcgcaccaggtacttctgaaagcgcaacccctgaatccggtccaggtagcgaaccggctacttctggctctgagactccaggtacttctaccgaaccgtccgaaggtagcgcacca

SEQ ID NO: 213 - DNA, 432 bp, Artificial Sequence
  Description of Artificial Sequence: Synthetic polynucleotide
ggtacttctactccggaaagcggttccgcatctccaggtacttctcctagcggtgaatcttctactgctccaggtacctctcctagcggcgaatcttctactgctccaggttctaccagctctaccgctgaatctcctggcccaggttctaccagcgaatccccgtctggcaccgcaccaggttctactagctctaccgcagaatctccgggtccaggtacttcccctagcggtgaatcttctactgctccaggtacctctactccggaaagcggctccgcatctccaggttctactagctctactgctgaatctcctggtccaggtacctcccctagcggcgaatcttctactgctccaggtacctctcctagcggcgaatcttctaccgctccaggtacctcccctagcggtgaatcttctaccgcacca

SEQ ID NO: 214 - DNA, 864 bp, Artificial Sequence
  Description of Artificial Sequence: Synthetic polynucleotide
ggtacctctgaaagcgcaactcctgagtctggcccaggtagcgaacctgctacctccggctctgagactccaggtacctctgaaagcgcaaccccggaatctggtccaggtagcgaacctgcaacctctggctctgaaaccccaggtacctctgaaagcgctactcctgaatctggcccaggtacttctactgaaccgtccgagggcagcgcaccaggtagccctgctggctctccaacctccaccgaagaaggtacctctgaaagcgcaacccctgaatccggcccaggtagcgaaccggcaacctccggttctgaaaccccaggtacttctgaaagcgctactcctgagtccggcccaggtagcccggctggctctccgacttccaccgaggaaggtagcccggctggctctccaacttctactgaagaaggtacttctaccgaaccttccgagggcagcgcaccaggtacttctgaaagcgctacccctgagtccggcccaggtacttctgaaagcgctactcctgaatccggtccaggtacttctgaaagcgctaccccggaatctggcccaggtagcgaaccggctacttctggttctgaaaccccaggtagcgaaccggctacctccggttctgaaactccaggtagcccagcaggctctccgacttccactgaggaaggtacttctactgaaccttccgaaggcagcgcaccaggtacctctactgaaccttctgagggcagcgctccaggtagcgaacctgcaacctctggctctgaaaccccaggtacctctgaaagcgctactcctgaatctggcccaggtacttctactgaaccgtccgagggcagcgcacca

SEQ ID NO: 215 - DNA, 1728 bp, Artificial Sequence
  Description of Artificial Sequence: Synthetic polynucleotide
ggtagcccggctggctctcctacctctactgaggaaggtacttctgaaagcgctactcctgagtctggtccaggtacctctactgaaccgtccgaaggtagcgctccaggtagcccagcaggctctccgacttccactgaggaaggtacttctactgaaccttccgaaggcagcgcaccaggtacctctactgaaccttctgagggcagcgctccaggtacttctgaaagcgctaccccggaatctggcccaggtagcgaaccggctacttctggttctgaaaccccaggtagcgaaccggctacctccggttctgaaactccaggtagcccggcaggctctccgacctctactgaggaaggtacttctgaaagcgcaaccccggagtccggcccaggtacctctaccgaaccgtctgagggcagcgcaccaggtacttctaccgaaccgtccgagggtagcgcaccaggtagcccagcaggttctcctacctccaccgaggaaggtacttctaccgaaccgtccgagggtagcgcaccaggtacctctactgaaccttctgagggcagcgctccaggtacttctgaaagcgctaccccggagtccggtccaggtacttctactgaaccgtccgaaggtagcgcaccaggtacttctgaaagcgcaacccctgaatccggtccaggtagcgaaccggctacttctggctctgagactccaggtacttctaccgaaccgtccgaaggtagcgcaccaggtacttctactgaaccgtctgaaggtagcgcaccaggtacttctgaaagcgcaaccccggaatccggcccaggtacctctgaaagcgcaaccccggagtccggcccaggtagccctgctggctctccaacctccaccgaagaaggtacctctgaaagcgcaacccctgaatccggcccaggtagcgaaccggcaacctccggttctgaaaccccaggtacctctgaaagcgctactccggagtctggcccaggtacctctactgaaccgtctgagggtagcgctccaggtacttctactgaaccgtccgaaggtagcgcaccaggtacttctaccgaaccgtccgaaggcagcgctccaggtacctctactgaaccttccgagggcagcgctccaggtacctctaccgaaccttctgaaggtagcgcaccaggtacttctaccgaaccgtccgagggtagcgcaccaggtagcccagcaggttctcctacctccaccgaggaaggtacttctaccgaaccgtccgagggtagcgcaccaggtacctctgaaagcgcaactcctgagtctggcccaggtagcgaacctgctacctccggctctgagactccaggtacctctgaaagcgcaaccccggaatctggtccaggtagcgaacctgcaacctctggctctgaaaccccaggtacctctgaaagcgctactcctgaatctggcccaggtacttctactgaaccgtccgagggcagcgcaccaggtacttctgaaagcgctactcctgagtccggcccaggtagcccggctggctctccgacttccaccgaggaaggtagcccggctggctctccaacttctactgaagaaggtagcccggcaggctctccgacctctactgaggaaggtacttctgaaagcgcaaccccggagtccggcccaggtacctctaccgaaccgtctgagggcagcgcacca

SEQ ID NO: 216 - DNA, 1728 bp, Artificial Sequence
  Description of Artificial Sequence: Synthetic polynucleotide
ggttctactagctctaccgctgaatctcctggcccaggttccactagctctaccgcagaatctccgggcccaggttctactagcgaatccccttctggtaccgctccaggttctactagctctaccgctgaatctccgggtccaggttctaccagctctactgcagaatctcctggcccaggtacttctactccggaaagcggttccgcttctccaggttctaccagcgaatctccttctggcaccgctccaggtacctctcctagcggcgaatcttctaccgctccaggttctactagcgaatctccttctggcactgcaccaggttctaccagcgaatctccttctggcaccgctccaggtacctctcctagcggcgaatcttctaccgctccaggttctactagcgaatctccttctggcactgcaccaggttctaccagcgaatctccttctggcaccgctccaggtacctctcctagcggcgaatcttctaccgctccaggttctactagcgaatctccttctggcactgcaccaggttctactagcgaatctccttctggcactgcaccaggttctaccagcgaatctccgtctggcactgcaccaggtacctctacccctgaaagcggttccgcttctccaggttctactagcgaatctccttctggtaccgctccaggtacttctacccctgaaagcggctccgcttctccaggttccactagctctaccgctgaatctccgggtccaggttctactagctctactgcagaatctcctggcccaggtacctctactccggaaagcggctctgcatctccaggtacttctacccctgaaagcggttctgcatctccaggttctactagcgaatccccgtctggtaccgcaccaggtacttctaccccggaaagcggctctgcttctccaggtacttctaccccggaaagcggctccgcatctccaggttctactagcgaatctccttctggtaccgctccaggttctaccagcgaatccccgtctggtactgctccaggttctaccagcgaatctccttctggtactgcaccaggttctactagctctactgcagaatctcctggcccaggtacctctactccggaaagcggctctgcatctccaggtacttctacccctgaaagcggttctgcatctccaggttctactagcgaatctccttctggcactgcaccaggttctaccagcgaatctccgtctggcactgcaccaggtacctctacccctgaaagcggttccgcttctccaggttctactagcgaatctccttctggcactgcaccaggttctaccagcgaatctccgtctggcactgcaccaggtacctctacccctgaaagcggttccgcttctccaggtacttctccgagcggtgaatcttctaccgcaccaggttctactagctctaccgctgaatctccgggcccaggtacttctccgagcggtgaatcttctactgctccaggttccactagctctactgctgaatctcctggcccaggtacttctactccggaaagcggttccgcttctccaggttctactagcgaatctccgtctggcaccgcaccaggttctactagctctactgcagaatctcctggcccaggtacctctactccggaaagcggctctgcatctccaggtacttctacccctgaaagcggttctgcatctcca

SEQ ID NO: 217 - DNA, 1875 bp, Artificial Sequence
  Description of Artificial Sequence: Synthetic polynucleotide
atggctgaacctgctggctctccaacctccactgaggaaggtaccccgggtagcggtactgcttcttcctctccaggtagctctaccccttctggtgcaaccggctctccaggtgcttctccgggcaccagctctaccggttctccaggtagcccggctggctctcctacctctactgaggaaggtacttctgaaagcgctactcctgagtctggtccaggtacctctactgaaccgtccgaaggtagcgctccaggtagcccagcaggctctccgacttccactgaggaaggtacttctactgaaccttccgaaggcagcgcaccaggtacctctactgaaccttctgagggcagcgctccaggtacttctgaaagcgctaccccggaatctggcccaggtagcgaaccggctacttctggttctgaaaccccaggtagcgaaccggctacctccggttctgaaactccaggtagcccggcaggctctccgacctctactgaggaaggtacttctgaaagcgcaaccccggagtccggcccaggtacctctaccgaaccgtctgagggcagcgcaccaggtacttctaccgaaccgtccgagggtagcgcaccaggtagcccagcaggttctcctacctccaccgaggaaggtacttctaccgaaccgtccgagggtagcgcaccaggtacctctactgaaccttctgagggcagcgctccaggtacttctgaaagcgctaccccggagtccggtccaggtacttctactgaaccgtccgaaggtagcgcaccaggtacttctgaaagcgcaacccctgaatccggtccaggtagcgaaccggctacttctggctctgagactccaggtacttctaccgaaccgtccgaaggtagcgcaccaggtacttctactgaaccgtctgaaggtagcgcaccaggtacttctgaaagcgcaaccccggaatccggcccaggtacctctgaaagcgcaaccccggagtccggcccaggtagccctgctggctctccaacctccaccgaagaaggtacctctgaaagcgcaacccctgaatccggcccaggtagcgaaccggcaacctccggttctgaaaccccaggtacctctgaaagcgctactccggagtctggcccaggtacctctactgaaccgtctgagggtagcgctccaggtacttctactgaaccgtccgaaggtagcgcaccaggtacttctaccgaaccgtccgaaggcagcgctccaggtacctctactgaaccttccgagggcagcgctccaggtacctctaccgaaccttctgaaggtagcgcaccaggtacttctaccgaaccgtccgagggtagcgcaccaggtagcccagcaggttctcctacctccaccgaggaaggtacttctaccgaaccgtccgagggtagcgcaccaggtacctctgaaagcgcaactcctgagtctggcccaggtagcgaacctgctacctccggctctgagactccaggtacctctgaaagcgcaaccccggaatctggtccaggtagcgaacctgcaacctctggctctgaaaccccaggtacctctgaaagcgctactcctgaatctggcccaggtacttctactgaaccgtccgagggcagcgcaccaggtacttctgaaagcgctactcctgagtccggcccaggtagcccggctggctctccgacttccaccgaggaaggtagcccggctggctctccaacttctactgaagaaggtagcccggcaggctctccgacctctactgaggaaggtacttctgaaagcgcaaccccggagtccggcccaggtacctctaccgaaccgtctgagggcagcgcacca

SEQ ID NO: 218 - DNA, 2625 bp, Artificial Sequence
  Description of Artificial Sequence: Synthetic polynucleotide
ggtacttctactgaaccgtctgaaggcagcgcaccaggtagcgaaccggctacttccggttctgaaaccccaggtagcccagcaggttctccaacttctactgaagaaggttctaccagctctaccgcagaatctcctggtccaggtacctctactccggaaagcggctctgcatctccaggttctactagcgaatctccttctggcactgcaccaggttctactagcgaatccccgtctggtactgctccaggtacttctactcctgaaagcggttccgcttctccaggtacctctactccggaaagcggttctgcatctccaggtagcgaaccggcaacctccggctctgaaaccccaggtacctctgaaagcgctactcctgaatccggcccaggtagcccggcaggttctccgacttccactgaggaaggtacctctactgaaccttctgagggcagcgctccaggtacttctgaaagcgctaccccggagtccggtccaggtacttctactgaaccgtccgaaggtagcgcaccaggtacttctaccgaaccgtccgagggtagcgcaccaggtagcccagcaggttctcctacctccaccgaggaaggtacttctaccgaaccgtccgagggtagcgcaccaggtacttctaccgaaccttccgagggcagcgcaccaggtacttctgaaagcgctacccctgagtccggcccaggtacttctgaaagcgctactcctgaatccggtccaggtacctctactgaaccttccgaaggcagcgctccaggtacctctaccgaaccgtccgagggcagcgcaccaggtacttctgaaagcgcaacccctgaatccggtccaggtacttctactgaaccttccgaaggtagcgctccaggtagcgaacctgctacttctggttctgaaaccccaggtagcccggctggctctccgacctccaccgaggaaggtagctctaccccgtctggtgctactggttctccaggtactccgggcagcggtactgcttcttcctctccaggtagctctaccccttctggtgctactggctctccaggtacctctaccgaaccgtccgagggtagcgcaccaggtacctctactgaaccgtctgagggtagcgctccaggtagcgaaccggcaacctccggttctgaaactccaggtagccctgctggctctccgacttctactgaggaaggtagcccggctggttctccgacttctactgaggaaggtacttctaccgaaccttccgaaggtagcgctccaggtgcaagcgcaagcggcgcgccaagcacgggaggtacttctgaaagcgctactcctgagtccggcccaggtagcccggctggctctccgacttccaccgaggaaggtagcccggctggctctccaacttctactgaagaaggttctaccagctctaccgctgaatctcctggcccaggttctactagcgaatctccgtctggcaccgcaccaggtacttcccctagcggtgaatcttctactgcaccaggtacccctggcagcggtaccgcttcttcctctccaggtagctctaccccgtctggtgctactggctctccaggttctagcccgtctgcatctaccggtaccggcccaggtagcgaaccggcaacctccggctctgaaactccaggtacttctgaaagcgctactccggaatccggcccaggtagcgaaccggctacttccggctctgaaaccccaggttccaccagctctactgcagaatctccgggcccaggttctactagctctactgcagaatctccgggtccaggtacttctcctagcggcgaatcttctaccgctccaggtagcgaaccggcaacctctggctctgaaactccaggtagcgaacctgcaacctccggctctgaaaccccaggtacttctactgaaccttctgagggcagcgcaccaggttctaccagctctaccgcagaatctcctggtccaggtacctctactccggaaagcggctctgcatctccaggttctactagcgaatctccttctggcactgcaccaggtacttctaccgaaccgtccgaaggcagcgctccaggtacctctactgaaccttccgagggcagcgctccaggtacctctaccgaaccttctgaaggtagcgcaccaggtagctctactccgtctggtgcaaccggctccccaggttctagcccgtctgcttccactggtactggcccaggtgcttccccgggcaccagctctactggttctccaggtagcgaacctgctacctccggttctgaaaccccaggtacctctgaaagcgcaactccggagtctggtccaggtagccctgcaggttctcctacctccactgaggaaggtagctctactccgtctggtgcaaccggctccccaggttctagcccgtctgcttccactggtactggcccaggtgcttccccgggcaccagctctactggttctccaggtacctctgaaagcgctactccggagtctggcccaggtacctctactgaaccgtctgagggtagcgctccaggtacttctactgaaccgtccgaaggtagcgcacca

SEQ ID NO: 219 - DNA, 2592 bp, Artificial Sequence
  Description of Artificial Sequence: Synthetic polynucleotide
ggtagcccggctggctctcctacctctactgaggaaggtacttctgaaagcgctactcctgagtctggtccaggtacctctactgaaccgtccgaaggtagcgctccaggtagcccagcaggctctccgacttccactgaggaaggtacttctactgaaccttccgaaggcagcgcaccaggtacctctactgaaccttctgagggcagcgctccaggtacttctgaaagcgctaccccggaatctggcccaggtagcgaaccggctacttctggttctgaaaccccaggtagcgaaccggctacctccggttctgaaactccaggtagcccggcaggctctccgacctctactgaggaaggtacttctgaaagcgcaaccccggagtccggcccaggtacctctaccgaaccgtctgagggcagcgcaccaggtacttctaccgaaccgtccgagggtagcgcaccaggtagcccagcaggttctcctacctccaccgaggaaggtacttctaccgaaccgtccgagggtagcgcaccaggtacctctactgaaccttctgagggcagcgctccaggtacttctgaaagcgctaccccggagtccggtccaggtacttctactgaaccgtccgaaggtagcgcaccaggtacttctgaaagcgcaacccctgaatccggtccaggtagcgaaccggctacttctggctctgagactccaggtacttctaccgaaccgtccgaaggtagcgcaccaggtacttctactgaaccgtctgaaggtagcgcaccaggtacttctgaaagcgcaaccccggaatccggcccaggtacctctgaaagcgcaaccccggagtccggcccaggtagccctgctggctctccaacctccaccgaagaaggtacctctgaaagcgcaacccctgaatccggcccaggtagcgaaccggcaacctccggttctgaaaccccaggtacctctgaaagcgctactccggagtctggcccaggtacctctactgaaccgtctgagggtagcgctccaggtacttctactgaaccgtccgaaggtagcgcaccaggtacttctaccgaaccgtccgaaggcagcgctccaggtacctctactgaaccttccgagggcagcgctccaggtacctctaccgaaccttctgaaggtagcgcaccaggtacttctaccgaaccgtccgagggtagcgcaccaggtagcccagcaggttctcctacctccaccgaggaaggtacttctaccgaaccgtccgagggtagcgcaccaggtacctctgaaagcgcaactcctgagtctggcccaggtagcgaacctgctacctccggctctgagactccaggtacctctgaaagcgcaaccccggaatctggtccaggtagcgaacctgcaacctctggctctgaaaccccaggtacctctgaaagcgctactcctgaatctggcccaggtacttctactgaaccgtccgagggcagcgcaccaggtacttctgaaagcgctactcctgagtccggcccaggtagcccggctggctctccgacttccaccgaggaaggtagcccggctggctctccaacttctactgaagaaggtagcccggcaggctctccgacctctactgaggaaggtacttctgaaagcgcaaccccggagtccggcccaggtacctctaccgaaccgtctgagggcagcgcaccaggtacctctgaaagcgcaactcctgagtctggcccaggtagcgaacctgctacctccggctctgagactccaggtacctctgaaagcgcaaccccggaatctggtccaggtagcgaacctgcaacctctggctctgaaaccccaggtacctctgaaagcgctactcctgaatctggcccaggtacttctactgaaccgtccgagggcagcgcaccaggtagccctgctggctctccaacctccaccgaagaaggtacctctgaaagcgcaacccctgaatccggcccaggtagcgaaccggcaacctccggttctgaaaccccaggtacttctgaaagcgctactcctgagtccggcccaggtagcccggctggctctccgacttccaccgaggaaggtagcccggctggctctccaacttctactgaagaaggtacttctaccgaaccttccgagggcagcgcaccaggtacttctgaaagcgctacccctgagtccggcccaggtacttctgaaagcgctactcctgaatccggtccaggtacttctgaaagcgctaccccggaatctggcccaggtagcgaaccggctacttctggttctgaaaccccaggtagcgaaccggctacctccggttctgaaactccaggtagcccagcaggctctccgacttccactgaggaaggtacttctactgaaccttccgaaggcagcgcaccaggtacctctactgaaccttctgagggcagcgctccaggtagcgaacctgcaacctctggctctgaaaccccaggtacctctgaaagcgctactcctgaatctggcccaggtacttctactgaaccgtccgagggcagcgcacca

SEQ ID NO: 220 - DNA, 2625 bp, Artificial Sequence
  Description of Artificial Sequence: Synthetic polynucleotide
  modified_base (1287)..(1298): a, c, t, g, unknown or other
  modified_base (1330)..(1337): a, c, t, g, unknown or other
ggttctaccagcgaatctccttctggcaccgctccaggtacctctcctagcggcgaatcttctaccgctccaggttctactagcgaatctccttctggcactgcaccaggttctactagcgaatccccgtctggtactgctccaggtacttctactcctgaaagcggttccgcttctccaggtacctctactccggaaagcggttctgcatctccaggttctaccagcgaatctccttctggcaccgctccaggttctactagcgaatccccgtctggtaccgcaccaggtacttctcctagcggcgaatcttctaccgcaccaggttctactagcgaatctccgtctggcactgctccaggtacttctcctagcggtgaatcttctaccgctccaggtacttcccctagcggcgaatcttctaccgctccaggttctactagctctactgcagaatctccgggcccaggtacctctcctagcggtgaatcttctaccgctccaggtacttctccgagcggtgaatcttctaccgctccaggttctactagctctactgcagaatctcctggcccaggtacctctactccggaaagcggctctgcatctccaggtacttctacccctgaaagcggttctgcatctccaggttctactagcgaatctccttctggcactgcaccaggttctaccagcgaatctccgtctggcactgcaccaggtacctctacccctgaaagcggttccgcttctccaggttctaccagctctaccgcagaatctcctggtccaggtacctctactccggaaagcggctctgcatctccaggttctactagcgaatctccttctggcactgcaccaggtacttctccgagcggtgaatcttctaccgcaccaggttctactagctctaccgctgaatctccgggcccaggtacttctccgagcggtgaatcttctactgctccaggtacctctactcctgaaagcggttctgcatctccaggttccactagctctaccgcagaatctccgggcccaggttctactagctctactgctgaatctcctggcccaggttctactagctctactgctgaatctccgggtccaggttctaccagctctactgctgaatctcctggtccaggtacctccccgagcggtgaatcttctactgcaccaggttctactagcgaatctccttctggcactgcaccaggttctaccagcgaatctccgtctggcactgcaccaggtacctctacccctgaaagcggtccnnnnnnnnnnnntgcaagcgcaagcggcgcgccaagcacgggannnnnnnntagcgaatctccttctggtaccgctccaggttctaccagcgaatccccgtctggtactgctccaggttctaccagcgaatctccttctggtactgcaccaggttctactagcgaatctccttctggtaccgctccaggttctaccagcgaatccccgtctggtactgctccaggttctaccagcgaatctccttctggtactgcaccaggtacttctactccggaaagcggttccgcatctccaggtacttctcctagcggtgaatcttctactgctccaggtacctctcctagcggcgaatcttctactgctccaggttctaccagctctactgctgaatctccgggtccaggtacttccccgagcggtgaatcttctactgcaccaggtacttctactccggaaagcggttccgcttctccaggttctaccagcgaatctccttctggcaccgctccaggttctactagcgaatccccgtctggtaccgcaccaggtacttctcctagcggcgaatcttctaccgcaccaggttctactagcgaatccccgtctggtaccgcaccaggtacttctaccccggaaagcggctctgcttctccaggtacttctaccccggaaagcggctccgcatctccaggttctactagcgaatctccttctggtaccgctccaggtacttctacccctgaaagcggctccgcttctccaggttccactagctctaccgctgaatctccgggtccaggttctaccagcgaatctccttctggcaccgctccaggttctactagcgaatccccgtctggtaccgcaccaggtacttctcctagcggcgaatcttctaccgcaccaggttctaccagctctactgctgaatctccgggtccaggtacttccccgagcggtgaatcttctactgcaccaggtacttctactccggaaagcggttccgcttctccaggtacctcccctagcggcgaatcttctactgctccaggtacctctcctagcggcgaatcttctaccgctccaggtacctcccctagcggtgaatcttctaccgcaccaggttctactagctctactgctgaatctccgggtccaggttctaccagctctactgctgaatctcctggtccaggtacctccccgagcggtgaatcttctactgcaccaggttctagcccttctgcttccaccggtaccggcccaggtagctctactccgtctggtgcaactggctctccaggtagctctactccgtctggtgcaaccggctcccca

SEQ ID NO: 221 - DNA, 2592 bp, Artificial Sequence
  Description of Artificial Sequence: Synthetic polynucleotide
ggtgcttccccgggcaccagctctactggttctccaggttctagcccgtctgcttctactggtactggtccaggttctagcccttctgcttccactggtactggtccaggtaccccgggtagcggtaccgcttcttcttctccaggtagctctactccgtctggtgctaccggctctccaggttctaacccttctgcatccaccggtaccggcccaggtgcttctccgggcaccagctctactggttctccaggtaccccgggcagcggtaccgcatcttcttctccaggtagctctactccttctggtgcaactggttctccaggtactcctggcagcggtaccgcttcttcttctccaggtgcttctcctggtactagctctactggttctccaggtgcttctccgggcactagctctactggttctccaggtaccccgggtagcggtactgcttcttcctctccaggtagctctaccccttctggtgcaaccggctctccaggtgcttctccgggcaccagctctaccggttctccaggtaccccgggtagcggtaccgcttcttcttctccaggtagctctactccgtctggtgctaccggctctccaggttctaacccttctgcatccaccggtaccggcccaggttctagcccttctgcttccaccggtactggcccaggtagctctaccccttctggtgctaccggctccccaggtagctctactccttctggtgcaactggctctccaggtgcatctccgggcactagctctactggttctccaggtgcatcccctggcactagctctactggttctccaggtgcttctcctggtaccagctctactggttctccaggtactcctggcagcggtaccgcttcttcttctccaggtgcttctcctggtactagctctactggttctccaggtgcttctccgggcactagctctactggttctccaggtgcttccccgggcactagctctaccggttctccaggttctagcccttctgcatctactggtactggcccaggtactccgggcagcggtactgcttcttcctctccaggtgcatctccgggcactagctctactggttctccaggtgcatcccctggcactagctctactggttctccaggtgcttctcctggtaccagctctactggttctccaggtagctctactccgtctggtgcaaccggttccccaggtagctctactccttctggtgctactggctccccaggtgcatcccctggcaccagctctaccggttctccaggtaccccgggcagcggtaccgcatcttcctctccaggtagctctaccccgtctggtgctaccggttccccaggtagctctaccccgtctggtgcaaccggctccccaggtagctctactccgtctggtgcaaccggctccccaggttctagcccgtctgcttccactggtactggcccaggtgcttccccgggcaccagctctactggttctccaggtgcatccccgggtaccagctctaccggttctccaggtactcctggcagcggtactgcatcttcctctccaggtgcttctccgggcaccagctctactggttctccaggtgcatctccgggcactagctctactggttctccaggtgcatcccctggcactagctctactggttctccaggtgcttctcctggtaccagctctactggttctccaggtacccctggtagcggtactgcttcttcctctccaggtagctctactccgtctggtgctaccggttctccaggtaccccgggtagcggtaccgcatcttcttctccaggtagctctaccccgtctggtgctactggttctccaggtactccgggcagcggtactgcttcttcctctccaggtagctctaccccttctggtgctactggctctccaggtagctctaccccgtctggtgctactggctccccaggttctagcccttctgcatccaccggtaccggtccaggttctagcccgtctgcatctactggtactggtccaggtgcatccccgggcactagctctaccggttctccaggtactcctggtagcggtactgcttcttcttctccaggtagctctactccttctggtgctactggttctccaggttctagcccttctgcatccaccggtaccggcccaggttctagcccgtctgcttctaccggtactggtccaggtgcttctccgggtactagctctactggttctccaggtgcatctcctggtactagctctactggttctccaggtagctctactccgtctggtgcaaccggctctccaggttctagcccttctgcatctaccggtactggtccaggtgcatcccctggtaccagctctaccggttctccaggttctagcccttctgcttctaccggtaccggtccaggtacccctggcagcggtaccgcatcttcctctccaggtagctctactccgtctggtgcaaccggttccccaggtagctctactccttctggtgctactggctccccaggtgcatcccctggcaccagctctaccggttctcca

SEQ ID NO: 222 - DNA, 2772 bp, Artificial Sequence
  Description of Artificial Sequence: Synthetic polynucleotide
atggctgaacctgctggctctccaacctccactgaggaaggtgcatccccgggcaccagctctaccggttctccaggtagctctaccccgtctggtgctaccggctctccaggtagctctaccccgtctggtgctactggctctccaggtacttctactgaaccgtctgaaggcagcgcaccaggtagcgaaccggctacttccggttctgaaaccccaggtagcccagcaggttctccaacttctactgaagaaggttctaccagctctaccgcagaatctcctggtccaggtacctctactccggaaagcggctctgcatctccaggttctactagcgaatctccttctggcactgcaccaggttctactagcgaatccccgtctggtactgctccaggtacttctactcctgaaagcggttccgcttctccaggtacctctactccggaaagcggttctgcatctccaggtagcgaaccggcaacctccggctctgaaaccccaggtacctctgaaagcgctactcctgaatccggcccaggtagcccggcaggttctccgacttccactgaggaaggtacctctactgaaccttctgagggcagcgctccaggtacttctgaaagcgctaccccggagtccggtccaggtacttctactgaaccgtccgaaggtagcgcaccaggtacttctaccgaaccgtccgagggtagcgcaccaggtagcccagcaggttctcctacctccaccgaggaaggtacttctaccgaaccgtccgagggtagcgcaccaggtacttctaccgaaccttccgagggcagcgcaccaggtacttctgaaagcgctacccctgagtccggcccaggtacttctgaaagcgctactcctgaatccggtccaggtacctctactgaaccttccgaaggcagcgctccaggtacctctaccgaaccgtccgagggcagcgcaccaggtacttctgaaagcgcaacccctgaatccggtccaggtacttctactgaaccttccgaaggtagcgctccaggtagcgaacctgctacttctggttctgaaaccccaggtagcccggctggctctccgacctccaccgaggaaggtagctctaccccgtctggtgctactggttctccaggtactccgggcagcggtactgcttcttcctctccaggtagctctaccccttctggtgctactggctctccaggtacctctaccgaaccgtccgagggtagcgcaccaggtacctctactgaaccgtctgagggtagcgctccaggtagcgaaccggcaacctccggttctgaaactccaggtagccctgctggctctccgacttctactgaggaaggtagcccggctggttctccgacttctactgaggaaggtacttctaccgaaccttccgaaggtagcgctccaggtgcaagcgcaagcggcgcgccaagcacgggaggtacttctgaaagcgctactcctgagtccggcccaggtagcccggctggctctccgacttccaccgaggaaggtagcccggctggctctccaacttctactgaagaaggttctaccagctctaccgctgaatctcctggcccaggttctactagcgaatctccgtctggcaccgcaccaggtacttcccctagcggtgaatcttctactgcaccaggtacccctggcagcggtaccgcttcttcctctccaggtagctctaccccgtctggtgctactggctctccaggttctagcccgtctgcatctaccggtaccggcccaggtagcgaaccggcaacctccggctctgaaactccaggtacttctgaaagcgctactccggaatccggcccaggtagcgaaccggctacttccggctctgaaaccccaggttccaccagctctactgcagaatctccgggcccaggttctactagctctactgcagaatctccgggtccaggtacttctcctagcggcgaatcttctaccgctccaggtagcgaaccggcaacctctggctctgaaactccaggtagcgaacctgcaacctccggctctgaaaccccaggtacttctactgaaccttctgagggcagcgcaccaggttctaccagctctaccgcagaatctcctggtccaggtacctctactccggaaagcggctctgcatctccaggttctactagcgaatctccttctggcactgcaccaggtacttctaccgaaccgtccgaaggcagcgctccaggtacctctactgaaccttccgagggcagcgctccaggtacctctaccgaaccttctgaaggtagcgcaccaggtagctctactccgtctggtgcaaccggctccccaggttctagcccgtctgcttccactggtactggcccaggtgcttccccgggcaccagctctactggttctccaggtagcgaacctgctacctccggttctgaaaccccaggtacctctgaaagcgcaactccggagtctggtccaggtagccctgcaggttctcctacctccactgaggaaggtagctctactccgtctggtgcaaccggctccccaggttctagcccgtctgcttccactggtactggcccaggtgcttccccgggcaccagctctactggttctccaggtacctctgaaagcgctactccggagtctggcccaggtacctctactgaaccgtctgagggtagcgctccaggtacttctactgaaccgtccgaaggtagcgcacca

SEQ ID NO: 223 - DNA, 2739 bp, Artificial Sequence
  Description of Artificial Sequence: Synthetic polynucleotide
atggctgaacctgctggctctccaacctccactgaggaaggtaccccgggtagcggtactgcttcttcctctccaggtagctctaccccttctggtgcaaccggctctccaggtgcttctccgggcaccagctctaccggttctccaggtagcccggctggctctcctacctctactgaggaaggtacttctgaaagcgctactcctgagtctggtccaggtacctctactgaaccgtccgaaggtagcgctccaggtagcccagcaggctctccgacttccactgaggaaggtacttctactgaaccttccgaaggcagcgcaccaggtacctctactgaaccttctgagggcagcgctccaggtacttctgaaagcgctaccccggaatctggcccaggtagcgaaccggctacttctggttctgaaaccccaggtagcgaaccggctacctccggttctgaaactccaggtagcccggcaggctctccgacctctactgaggaaggtacttctgaaagcgcaaccccggagtccggcccaggtacctctaccgaaccgtctgagggcagcgcaccaggtacttctaccgaaccgtccgagggtagcgcaccaggtagcccagcaggttctcctacctccaccgaggaaggtacttctaccgaaccgtccgagggtagcgcaccaggtacctctactgaaccttctgagggcagcgctccaggtacttctgaaagcgctaccccggagtccggtccaggtacttctactgaaccgtccgaaggtagcgcaccaggtacttctgaaagcgcaacccctgaatccggtccaggtagcgaaccggctacttctggctctgagactccaggtacttctaccgaaccgtccgaaggtagcgcaccaggtacttctactgaaccgtctgaaggtagcgcaccaggtacttctgaaagcgcaaccccggaatccggcccaggtacctctgaaagcgcaaccccggagtccggcccaggtagccctgctggctctccaacctccaccgaagaaggtacctctgaaagcgcaacccctgaatccggcccaggtagcgaaccggcaacctccggttctgaaaccccaggtacctctgaaagcgctactccggagtctggcccaggtacctctactgaaccgtctgagggtagcgctccaggtacttctactgaaccgtccgaaggtagcgcaccaggtacttctaccgaaccgtccgaaggcagcgctccaggtacctctactgaaccttccgagggcagcgctccaggtacctctaccgaaccttctgaaggtagcgcaccaggtacttctaccgaaccgtccgagggtagcgcaccaggtagcccagcaggttctcctacctccaccgaggaaggtacttctaccgaaccgtccgagggtagcgcaccaggtacctctgaaagcgcaactcctgagtctggcccaggtagcgaacctgctacctccggctctgagactccaggtacctctgaaagcgcaaccccggaatctggtccaggtagcgaacctgcaacctctggctctgaaaccccaggtacctctgaaagcgctactcctgaatctggcccaggtacttctactgaaccgtccgagggcagcgcaccaggtacttctgaaagcgctactcctgagtccggcccaggtagcccggctggctctccgacttccaccgaggaaggtagcccggctggctctccaacttctactgaagaaggtagcccggcaggctctccgacctctactgaggaaggtacttctgaaagcgcaaccccggagtccggcccaggtacctctaccgaaccgtctgagggcagcgcaccaggtacctctgaaagcgcaactcctgagtctggcccaggtagcgaacctgctacctccggctctgagactccaggtacctctgaaagcgcaaccccggaatctggtccaggtagcgaacctgcaacctctggctctgaaaccccaggtacctctgaaagcgctactcctgaatctggcccaggtacttctactgaaccgtccgagggcagcgcaccaggtagccctgctggctctccaacctccaccgaagaaggtacctctgaaagcgcaacccctgaatccggcccaggtagcgaaccggcaacctccggttctgaaaccccaggtacttctgaaagcgctactcctgagtccggcccaggtagcccggctggctctccgacttccaccgaggaaggtagcccggctggctctccaacttctactgaagaaggtacttctaccgaaccttccgagggcagcgcaccaggtacttctgaaagcgctacccctgagtccggcccaggtacttctgaaagcgctactcctgaatccggtccaggtacttctgaaagcgctaccccggaatctggcccaggtagcgaaccggctacttctggttctgaaaccccaggtagcgaaccggctacctccggttctgaaactccaggtagcccagcaggctctccgacttccactgaggaaggtacttctactgaaccttccgaaggcagcgcaccaggtacctctactgaaccttctgagggcagcgctccaggtagcgaacctgcaacctctggctctgaaaccccaggtacctctgaaagcgctactcctgaatctggcccaggtacttctactgaaccgtccgagggcagcgcacca

SEQ ID NO: 224 - DNA, 3954 bp, Artificial Sequence
  Description of Artificial Sequence: Synthetic polynucleotide
ggtacttctactgaaccgtctgaaggcagcgcaccaggtagcgaaccggctacttccggttctgaaaccccaggtagcccagcaggttctccaacttctactgaagaaggttctaccagctctaccgcagaatctcctggtccaggtacctctactccggaaagcggctctgcatctccaggttctactagcgaatctccttctggcactgcaccaggttctactagcgaatccccgtctggtactgctccaggtacttctactcctgaaagcggttccgcttctccaggtacctctactccggaaagcggttctgcatctccaggtagcgaaccggcaacctccggctctgaaaccccaggtacctctgaaagcgctactcctgaatccggcccaggtagcccggcaggttctccgacttccactgaggaaggtacctctactgaaccttctgagggcagcgctccaggtacttctgaaagcgctaccccggagtccggtccaggtacttctactgaaccgtccgaaggtagcgcaccaggtacttctaccgaaccgtccgagggtagcgcaccaggtagcccagcaggttctcctacctccaccgaggaaggtacttctaccgaaccgtccgagggtagcgcaccaggtacttctaccgaaccttccgagggcagcgcaccaggtacttctgaaagcgctacccctgagtccggcccaggtacttctgaaagcgctactcctgaatccggtccaggtacctctactgaaccttccgaaggcagcgctccaggtacctctaccgaaccgtccgagggcagcgcaccaggtacttctgaaagcgcaacccctgaatccggtccaggtacttctactgaaccttccgaaggtagcgctccaggtagcgaacctgctacttctggttctgaaaccccaggtagcccggctggctctccgacctccaccgaggaaggtagctctaccccgtctggtgctactggttctccaggtactccgggcagcggtactgcttcttcctctccaggtagctctaccccttctggtgctactggctctccaggtacctctaccgaaccgtccgagggtagcgcaccaggtacctctactgaaccgtctgagggtagcgctccaggtagcgaaccggcaacctccggttctgaaactccaggtagccctgctggctctccgacttctactgaggaaggtagcccggctggttctccgacttctactgaggaaggtacttctaccgaaccttccgaaggtagcgctccaggtccagaaccaacggggccggccccaagcggaggtagcgaaccggcaacctccggctctgaaaccccaggtacctctgaaagcgctactcctgaatccggcccaggtagcccggcaggttctccgacttccactgaggaaggtacttctgaaagcgctactcctgagtccggcccaggtagcccggctggctctccgacttccaccgaggaaggtagcccggctggctctccaacttctactgaagaaggtacttctgaaagcgctactcctgagtccggcccaggtagcccggctggctctccgacttccaccgaggaaggtagcccggctggctctccaacttctactgaagaaggttctaccagctctaccgctgaatctcctggcccaggttctactagcgaatctccgtctggcaccgcaccaggtacttcccctagcggtgaatcttctactgcaccaggttctaccagcgaatctccttctggcaccgctccaggttctactagcgaatccccgtctggtaccgcaccaggtacttctcctagcggcgaatcttctaccgcaccaggtacttctaccgaaccttccgagggcagcgcaccaggtacttctgaaagcgctacccctgagtccggcccaggtacttctgaaagcgctactcctgaatccggtccaggtagcgaaccggcaacctctggctctgaaaccccaggtacctctgaaagcgctactccggaatctggtccaggtacttctgaaagcgctactccggaatccggtccaggtacctctactgaaccttctgagggcagcgctccaggtacttctgaaagcgctaccccggagtccggtccaggtacttctactgaaccgtccgaaggtagcgcaccaggtacctcccctagcggcgaatcttctactgctccaggtacctctcctagcggcgaatcttctaccgctccaggtacctcccctagcggtgaatcttctaccgcaccaggtacttctaccgaaccgtccgagggtagcgcaccaggtagcccagcaggttctcctacctccaccgaggaaggtacttctaccgaaccgtccgagggtagcgcaccaggttctagcccttctgcttccaccggtaccggcccaggtagctctactccgtctggtgcaactggctctccaggtagctctactccgtctggtgcaaccggctccccaggtagctctaccccgtctggtgctaccggctctccaggtagctctaccccgtctggtgcaaccggctccccaggtgcatccccgggtactagctctaccggttctccaggtgcaagcgcaagcggcgcgccaagcacgggaggtacttctccgagcggtgaatcttctaccgcaccaggttctactagctctaccgctgaatctccgggcccaggtacttctccgagcggtgaatcttctactgctccaggtacctctgaaagcgctactccggagtctggcccaggtacctctactgaaccgtctgagggtagcgctccaggtacttctactgaaccgtccgaaggtagcgcaccaggttctagcccttctgcatctactggtactggcccaggtagctctactccttctggtgctaccggctctccaggtgcttctccgggtactagctctaccggttctccaggtacttctactccggaaagcggttccgcatctccaggtacttctcctagcggtgaatcttctactgctccaggtacctctcctagcggcgaatcttctactgctccaggtacttctgaaagcgcaacccctgaatccggtccaggtagcgaaccggctacttctggctctgagactccaggtacttctaccgaaccgtccgaaggtagcgcaccaggttctaccagcgaatccccttctggtactgctccaggttctaccagcgaatccccttctggcaccgcaccaggtacttctacccctgaaagcggctccgcttctccaggtagcccggcaggctctccgacctctactgaggaaggtacttctgaaagcgcaaccccggagtccggcccaggtacctctaccgaaccgtctgagggcagcgcaccaggtagccctgctggctctccaacctccaccgaagaaggtacctctgaaagcgcaacccctgaatccggcccaggtagcgaaccggcaacctccggttctgaaaccccaggtagctctaccccgtctggtgctaccggttccccaggtgcttctcctggtactagctctaccggttctccaggtagctctaccccgtctggtgctactggctctccaggttctactagcgaatccccgtctggtactgctccaggtacttcccctagcggtgaatcttctactgctccaggttctaccagctctaccgcagaatctccgggtccaggtagctctaccccttctggtgcaaccggctctccaggtgcatccccgggtaccagctctaccggttctccaggtactccgggtagcggtaccgcttcttcctctccaggtagccctgctggctctccgacttctactgaggaaggtagcccggctggttctccgacttctactgaggaaggtacttctaccgaaccttccgaaggtagcgctcca

SEQ ID NO: 225 - DNA, 2592 bp, Artificial Sequence
  Description of Artificial Sequence: Synthetic polynucleotide
ggtacttccaccgaaccatccgaaccaggtagcgcaggtacttccaccgaaccatccgaacctggcagcgcaggtagcgaaccggcaacctctggtactgaaccatcaggtagcggcgcatccgagcctacctctactgaaccaggtagcgaaccggctacctccggtactgagccatcaggtagcgaaccggcaacttccggtactgaaccatcaggtagcgaaccggcaacttccggcactgaaccatcaggtagcggtgcatctgagccgacctctactgaaccaggtacttctactgaaccatctgagccgggcagcgcaggtagcgaaccagctacttctggcactgaaccatcaggtacttctactgaaccatccgaaccaggtagcgcaggtagcgaacctgctacctctggtactgagccatcaggtagcgaaccggctacctctggtactgaaccatcaggtacttctaccgaaccatccgagcctggtagcgcaggtacttctaccgaaccatccgagccaggcagcgcaggtagcgaaccggcaacctctggcactgagccatcaggtagcgaaccagcaacttctggtactgaaccatcaggtactagcgagccatctacttccgaaccaggtgcaggtagcggcgcatccgaacctacttccactgaaccaggtactagcgagccatccacctctgaaccaggtgcaggtagcgaaccggcaacttccggcactgaaccatcaggtagcgaaccggctacctctggtactgaaccatcaggtacttctaccgaaccatccgagcctggtagcgcaggtacttctaccgaaccatccgagccaggcagcgcaggtagcggtgcatccgagccgacctctactgaaccaggtagcgaaccagcaacttctggcactgagccatcaggtagcgaaccagctacctctggtactgaaccatcaggtagcgaaccggctacttccggcactgaaccatcaggtagcgaaccagcaacctccggtactgaaccatcaggtacttccactgaaccatccgaaccgggtagcgcaggtagcgaaccggcaacttccggcactgaaccatcaggtagcggtgcatctgagccgacctctactgaaccaggtacttctactgaaccatctgagccgggcagcgcaggtagcgaacctgcaacctccggcactgagccatcaggtagcggcgcatctgaaccaacctctactgaaccaggtacttccaccgaaccatctgagccaggcagcgcaggtagcggcgcatctgaaccaacctctactgaaccaggtagcgaaccagcaacttctggtactgaaccatcaggtagcggcgcatctgagcctacttccactgaaccaggtagcgaaccggcaacttccggcactgaaccatcaggtagcggtgcatctgagccgacctctactgaaccaggtacttctactgaaccatctgagccgggcagcgcaggtagcgaaccggcaacttccggcactgaaccatcaggtagcggtgcatctgagccgacctctactgaaccaggtacttctactgaaccatctgagccgggcagcgcaggtagcgaaccagctacttctggcactgaaccatcaggtacttctactgaaccatccgaaccaggtagcgcaggtagcgaacctgctacctctggtactgagccatcaggtacttctactgaaccatccgagccgggtagcgcaggtacttccactgaaccatctgaacctggtagcgcaggtacttccactgaaccatccgaaccaggtagcgcaggtacttctactgaaccatccgagccgggtagcgcaggtacttccactgaaccatctgaacctggtagcgcaggtacttccactgaaccatccgaaccaggtagcgcaggtactagcgaaccatccacctccgaaccaggcgcaggtagcggtgcatctgaaccgacttctactgaaccaggtacttccactgaaccatctgagccaggtagcgcaggtacttccaccgaaccatccgaaccaggtagcgcaggtacttccaccgaaccatccgaacctggcagcgcaggtagcgaaccggcaacctctggtactgaaccatcaggtagcggtgcatccgagccgacctctactgaaccaggtagcgaaccagcaacttctggcactgagccatcaggtagcgaaccagctacctctggtactgaaccatcaggtagcgaaccggcaacctctggcactgagccatcaggtagcgaaccagcaacttctggtactgaaccatcaggtactagcgagccatctacttccgaaccaggtgcaggtagcgaacctgcaacctccggcactgagccatcaggtagcggcgcatctgaaccaacctctactgaaccaggtacttccaccgaaccatctgagccaggcagcgcaggtagcgaacctgcaacctccggcactgagccatcaggtagcggcgcatctgaaccaacctctactgaaccaggtacttccaccgaaccatctgagccaggcagcgca

SEQ ID NO: 226 - DNA, 2592 bp, Artificial Sequence
  Description of Artificial Sequence: Synthetic polynucleotide
ggtagcgaaactgctacttccggctctgagactgcaggtactagtgaatccgcaactagcgaatctggcgcaggtagcactgcaggctctgagacttccactgaagcaggtactagcgagtccgcaaccagcgaatccggcgcaggtagcgaaactgctacctctggctccgagactgcaggtagcgaaactgcaacctctggctctgaaactgcaggtacttccactgaagcaagtgaaggctccgcatcaggtacttccaccgaagcaagcgaaggctccgcatcaggtactagtgagtccgcaactagcgaatccggtgcaggtagcgaaaccgctacctctggttccgaaactgcaggtacttctaccgaggctagcgaaggttctgcatcaggtagcactgctggttccgagacttctactgaagcaggtactagcgaatctgctactagcgaatccggcgcaggtactagcgaatccgctaccagcgaatccggcgcaggtagcgaaactgcaacctctggttccgagactgcaggtactagcgagtccgctactagcgaatctggcgcaggtacttccactgaagctagtgaaggttctgcatcaggtagcgaaactgctacttctggttccgaaactgcaggtagcgaaaccgctacctctggttccgaaactgcaggtacttctaccgaggctagcgaaggttctgcatcaggtagcactgctggttccgagacttctactgaagcaggtactagcgagtccgctactagcgaatctggcgcaggtacttccactgaagctagtgaaggttctgcatcaggtagcgaaactgctacttctggttccgaaactgcaggtagcactgctggctccgagacttctaccgaagcaggtagcactgcaggttccgaaacttccactgaagcaggtagcgaaactgctacctctggctctgagactgcaggtactagcgaatctgctactagcgaatccggcgcaggtactagcgaatccgctaccagcgaatccggcgcaggtagcgaaactgcaacctctggttccgagactgcaggtactagcgaatctgctactagcgaatccggcgcaggtactagcgaatccgctaccagcgaatccggcgcaggtagcgaaactgcaacctctggttccgagactgcaggtagcgaaaccgctacctctggttccgaaactgcaggtacttctaccgaggctagcgaaggttctgcatcaggtagcactgctggttccgagacttctactgaagcaggtagcgaaactgctacttccggctctgagactgcaggtactagtgaatccgcaactagcgaatctggcgcaggtagcactgcaggctctgagacttccactgaagcaggtagcactgctggttccgaaacctctaccgaagcaggtagcactgcaggttctgaaacctccactgaagcaggtacttccactgaggctagtgaaggctctgcatcaggtagcactgctggttccgaaacctctaccgaagcaggtagcactgcaggttctgaaacctccactgaagcaggtacttccactgaggctagtgaaggctctgcatcaggtagcactgcaggttctgagacttccaccgaagcaggtagcgaaactgctacttctggttccgaaactgcaggtacttccactgaagctagtgaaggttccgcatcaggtactagtgagtccgcaaccagcgaatccggcgcaggtagcgaaaccgcaacctccggttctgaaactgcaggtactagcgaatccgcaaccagcgaatctggcgcaggtactagtgagtccgcaaccagcgaatccggcgcaggtagcgaaaccgcaacctccggttctgaaactgcaggtactagcgaatccgcaaccagcgaatctggcgcaggtagcgaaactgctacttccggctctgagactgcaggtacttccaccgaagcaagcgaaggttccgcatcaggtacttccaccgaggctagtgaaggctctgcatcaggtagcactgctggctccgagacttctaccgaagcaggtagcactgcaggttccgaaacttccactgaagcaggtagcgaaactgctacctctggctctgagactgcaggtactagcgaatctgctactagcgaatccggcgcaggtactagcgaatccgctaccagcgaatccggcgcaggtagcgaaactgcaacctctggttccgagactgcaggtagcgaaactgctacttccggctccgagactgcaggtagcgaaactgctacttctggctccgaaactgcaggtacttctactgaggctagtgaaggttccgcatcaggtactagcgagtccgcaaccagcgaatccggcgcaggtagcgaaactgctacctctggctccgagactgcaggtagcgaaactgcaacctctggctctgaaactgcaggtactagcgaatctgctactagcgaatccggcgcaggtactagcgaatccgctaccagcgaatccggcgcaggtagcgaaactgcaacctctggttccgagactgca

SEQ ID NO: 227 - DNA, 37 bp, Artificial Sequence
  Description of Artificial Sequence: Synthetic oligonucleotide
aggtgcaagcgcaagcggcgcgccaagcacgggaggt

SEQ ID NO: 228 - DNA, 37 bp, Artificial Sequence
  Description of Artificial Sequence: Synthetic oligonucleotide
aggtccagaaccaacggggccggccccaagcggaggt

SEQ ID NO: 229 - protein, 6 aa, Artificial Sequence
  Description of Artificial Sequence: Synthetic 6xHis tag
HHHHHH

SEQ ID NO: 230 - DNA, 147 bp, Artificial Sequence
  Description of Artificial Sequence: Synthetic polynucleotide
atggctgaacctgctggctctccaacctccactgaggaaggtaccccgggtagcggtactgcttcttcctctccaggtagctctaccccttctggtgcaaccggctctccaggtgcttctccgggcaccagctctaccggttctcca

SEQ ID NO: 231 - DNA, 147 bp, Artificial Sequence
  Description of Artificial Sequence: Synthetic polynucleotide
atggctgaacctgctggctctccaacctccactgaggaaggtgcatccccgggcaccagctctaccggttctccaggtagctctaccccgtctggtgctaccggctctccaggtagctctaccccgtctggtgctactggctctcca

SEQ ID NO: 232 - protein, 12 aa, Artificial Sequence
  Description of Artificial Sequence: Synthetic peptide
GESPGGSSGSES

SEQ ID NO: 233 - protein, 12 aa, Artificial Sequence
  Description of Artificial Sequence: Synthetic peptide
GSEGSSGPGESS

SEQ ID NO: 234 - protein, 12 aa, Artificial Sequence
  Description of Artificial Sequence: Synthetic peptide
GSSESGSSEGGP

SEQ ID NO: 235 - protein, 12 aa, Artificial Sequence
  Description of Artificial Sequence: Synthetic peptide
GSGGEPSESGSS

SEQ ID NO: 236 - DNA, 36 bp, Artificial Sequence
  Description of Artificial Sequence: Synthetic oligonucleotide
aggtgaatctccdggtggytcyagcggttcygartc

SEQ ID NO: 237 - DNA, 36 bp, Artificial Sequence
  Description of Artificial Sequence: Synthetic oligonucleotide
acctgaytcrgaaccgctrgarccacchggagattc

SEQ ID NO: 238 - DNA, 36 bp, Artificial Sequence
  Description of Artificial Sequence: Synthetic oligonucleotide
aggtagcgaaggttcttcyggtccdggygartcytc

SEQ ID NO: 239 - DNA, 36 bp, Artificial Sequence
  Description of Artificial Sequence: Synthetic oligonucleotide
acctgargaytcrcchggaccrgaagaaccttcgct

SEQ ID NO: 240 - DNA, 36 bp, Artificial Sequence
  Description of Artificial Sequence: Synthetic oligonucleotide
aggttcytcygaaagcggttcttcygarggyggtcc

SEQ ID NO: 241 - DNA, 36 bp, Artificial Sequence
  Description of Artificial Sequence: Synthetic oligonucleotide
acctggaccrccytcrgaagaaccgctttcrgarga

SEQ ID NO: 242 - DNA, 36 bp, Artificial Sequence
  Description of Artificial Sequence: Synthetic oligonucleotide
aggttcyggtggygaaccdtcygartctggtagctc

SEQ ID NO: 243 - DNA, 24 bp, Artificial Sequence
  Description of Artificial Sequence: Synthetic oligonucleotide
aggttcgtcttcactcgagggtac

SEQ ID NO: 244 - DNA, 16 bp, Artificial Sequence
  Description of Artificial Sequence: Synthetic oligonucleotide
cctcgagtgaagacga

SEQ ID NO: 245 - protein, 36 aa, Artificial Sequence
  Description of Artificial Sequence: Synthetic polypeptide
GSGGEPSESGSSGESPGGSSGSESGESPGGSSGSES

SEQ ID NO: 246 - DNA, 108 bp, Artificial Sequence
  Description of Artificial Sequence: Synthetic polynucleotide
ggttctggtggcgaaccgtccgagtctggtagctcaggtgaatctccgggtggctctagcggttccgagtcaggtgaatctcctggtggttccagcggttccgagtca

SEQ ID NO: 247 - protein, 36 aa, Artificial Sequence
  Description of Artificial Sequence: Synthetic polypeptide
GSEGSSGPGESSGESPGGSSGSESGSSESGSSEGGP

SEQ ID NO: 248 - DNA, 108 bp, Artificial Sequence
  Description of Artificial Sequence: Synthetic polynucleotide
ggtagcgaaggttcttctggtcctggcgagtcttcaggtgaatctcctggtggttccagcggttctgaatcaggttcctccgaaagcggttcttccgagggcggtcca

SEQ ID NO: 249 - protein, 36 aa, Artificial Sequence
  Description of Artificial Sequence: Synthetic polypeptide
GSSESGSSEGGPGSSESGSSEGGPGESPGGSSGSES

SEQ ID NO: 250 - DNA, 108 bp, Artificial Sequence
  Description of Artificial Sequence: Synthetic polynucleotide
ggttcctctgaaagcggttcttccgaaggtggtccaggttcctctgaaagcggttcttctgagggtggtccaggtgaatctccgggtggctccagcggttccgagtca

SEQ ID NO: 251 - protein, 36 aa, Artificial Sequence
  Description of Artificial Sequence: Synthetic polypeptide
GSGGEPSESGSSGSSESGSSEGGPGSGGEPSESGSS

SEQ ID NO: 252 - DNA, 108 bp, Artificial Sequence
  Description of Artificial Sequence: Synthetic polynucleotide
ggttccggtggcgaaccgtctgaatctggtagctcaggttcttctgaaagcggttcttccgagggtggtccaggttctggtggtgaaccttccgagtctggtagctca

SEQ ID NO: 253 - protein, 36 aa, Artificial Sequence
  Description of Artificial Sequence: Synthetic polypeptide
GSSESGSSEGGPGSEGSSGPGESSGSEGSSGPGESS

SEQ ID NO: 254 - DNA, 108 bp, Artificial Sequence
  Description of Artificial Sequence: Synthetic polynucleotide
ggttcttccgaaagcggttcttctgagggtggtccaggtagcgaaggttcttccggtccaggtgagtcttcaggtagcgaaggttcttctggtcctggtgaatcttca

SEQ ID NO: 255 - protein, 36 aa, Artificial Sequence
  Description of Artificial Sequence: Synthetic polypeptide
GSSESGSSEGGPGESPGGSSGSESGSEGSSGPGESS

SEQ ID NO: 256 - DNA, 108 bp, Artificial Sequence
  Description of Artificial Sequence: Synthetic polynucleotide
ggttcctctgaaagcggttcttccgagggtggtccaggtgaatctccaggtggttccagcggttctgagtcaggtagcgaaggttcttctggtccaggtgaatcctca

SEQ ID NO: 257 - protein, 36 aa, Artificial Sequence
  Description of Artificial Sequence: Synthetic polypeptide
GSGGEPSESGSSGSGGEPSESGSSGSEGSSGPGESS

SEQ ID NO: 258 - DNA, 108 bp, Artificial Sequence
  Description of Artificial Sequence: Synthetic polynucleotide
ggttctggtggtgaaccgtctgagtctggtagctcaggttccggtggcgaaccatccgaatctggtagctcaggtagcgaaggttcttccggtccaggtgagtcttca

SEQ ID NO: 259 - protein, 36 aa, Artificial Sequence
  Description of Artificial Sequence: Synthetic polypeptide
GSSESGSSEGGPGSEGSSGPGESSGESPGGSSGSES

SEQ ID NO: 260 - DNA, 108 bp, Artificial Sequence
  Description of Artificial Sequence: Synthetic polynucleotide
ggttcttccgaaagcggttcttccgaaggcggtccaggtagcgaaggttcttctggtccaggcgaatcttcaggtgaatctcctggtggctccagcggttctgagtca

SEQ ID NO: 261 - protein, 36 aa, Artificial Sequence
  Description of Artificial Sequence: Synthetic polypeptide
GSSESGSSEGGPGSSESGSSEGGPGSSESGSSEGGP

SEQ ID NO: 262 - DNA, 108 bp, Artificial Sequence
  Description of Artificial Sequence: Synthetic polynucleotide
ggttcctccgaaagcggttcttctgagggcggtccaggttcctccgaaagcggttcttccgagggcggtccaggttcttctgaaagcggttcttccgagggcggtcca

SEQ ID NO: 263 - protein, 36 aa, Artificial Sequence
  Description of Artificial Sequence: Synthetic polypeptide
GSGGEPSESGSSGSEGSSGPGESSGSSESGSSEGGP

SEQ ID NO: 264 - DNA, 108 bp, Artificial Sequence
  Description of Artificial Sequence: Synthetic polynucleotide
ggttccggtggcgaaccgtccgaatctggtagctcaggtagcgaaggttcttctggtccaggcgaatcttcaggttcctctgaaagcggttcttctgagggcggtcca

SEQ ID NO: 265 - protein, 36 aa, Artificial Sequence; identical to SEQ ID NO: 251
  Description of Artificial Sequence: Synthetic polypeptide

SEQ ID NO: 266 - DNA, 108 bp, Artificial Sequence
  Description of Artificial Sequence: Synthetic polynucleotide
ggttctggtggtgaaccgtccgaatctggtagctcaggttcttccgaaagcggttcttctgaaggtggtccaggttccggtggcgaaccttctgaatctggtagctca

SEQ ID NO: 267 - protein, 36 aa, Artificial Sequence
  Description of Artificial Sequence: Synthetic polypeptide
GSGGEPSESGSSGSSESGSSEGGPGESPGGSSGSES

SEQ ID NO: 268 - DNA, 108 bp, Artificial Sequence
  Description of Artificial Sequence: Synthetic polynucleotide
ggttctggtggcgaaccgtccgaatctggtagctcaggttcctccgaaagcggttcttctgaaggtggtccaggtgaatctccaggtggttctagcggttctgaatca

SEQ ID NO: 269 - protein, 36 aa, Artificial Sequence
  Description of Artificial Sequence: Synthetic polypeptide
GSGGEPSESGSSGESPGGSSGSESGSEGSSGPGESS

SEQ ID NO: 270 - DNA, 108 bp, Artificial Sequence
  Description of Artificial Sequence: Synthetic polynucleotide
ggttctggtggcgaaccgtctgagtctggtagctcaggtgaatctcctggtggctccagcggttctgaatcaggtagcgaaggttcttctggtcctggtgaatcttca

SEQ ID NO: 271 - protein, 36 aa, Artificial Sequence
  Description of Artificial Sequence: Synthetic polypeptide
GSGGEPSESGSSGESPGGSSGSESGSGGEPSESGSS

SEQ ID NO: 272 - DNA, 108 bp, Artificial Sequence
  Description of Artificial Sequence: Synthetic polynucleotide
ggttccggtggcgaaccttccgaatctggtagctcaggtgaatctccgggtggttctagcggttctgagtcaggttctggtggtgaaccttccgagtctggtagctca

SEQ ID NO: 273 - protein, 36 aa, Artificial Sequence; identical to SEQ ID NO: 261
  Description of Artificial Sequence: Synthetic polypeptide

SEQ ID NO: 274 - DNA, 108 bp, Artificial Sequence
  Description of Artificial Sequence: Synthetic polynucleotide
ggttcctctgaaagcggttcttctgagggcggtccaggttcttccgaaagcggttcttccgagggcggtccaggttcttccgaaagcggttcttctgaaggcggtcca

SEQ ID NO: 275 - protein, 36 aa, Artificial Sequence
  Description of Artificial Sequence: Synthetic polypeptide
GESPGGSSGSESGSEGSSGPGESSGSEGSSGPGESS

SEQ ID NO: 276 - DNA, 108 bp, Artificial Sequence
  Description of Artificial Sequence: Synthetic polynucleotide
ggtgaatctccgggtggctccagcggttctgagtcaggtagcgaaggttcttccggtccgggtgagtcctcaggtagcgaaggttcttccggtcctggtgagtcttca

SEQ ID NO: 277 - protein, 36 aa, Artificial Sequence
  Description of Artificial Sequence: Synthetic polypeptide
GSGGEPSESGSSGSGGEPSESGSSGSSESGSSEGGP

SEQ ID NO: 278 - DNA, 108 bp, Artificial Sequence
  Description of Artificial Sequence: Synthetic polynucleotide
ggttctggtggcgaaccttccgaatctggtagctcaggttccggtggtgaaccttctgaatctggtagctcaggttcttctgaaagcggttcttccgagggcggtcca

SEQ ID NO: 279 - protein, 36 aa, Artificial Sequence
  Description of Artificial Sequence: Synthetic polypeptide
GSGGEPSESGSSGSGGEPSESGSSGSGGEPSESGSS

SEQ ID NO: 280 - DNA, 108 bp, Artificial Sequence
  Description of Artificial Sequence: Synthetic polynucleotide
ggttccggtggtgaaccttctgaatctggtagctcaggttccggtggcgaaccatccgagtctggtagctcaggttccggtggtgaaccatccgagtctggtagctca

SEQ ID NO: 281 - protein, 36 aa, Artificial Sequence
  Description of Artificial Sequence: Synthetic polypeptide
GSGGEPSESGSSGSSESGSSEGGPGSEGSSGPGESS

SEQ ID NO: 282 - DNA, 108 bp, Artificial Sequence
  Description of Artificial Sequence: Synthetic polynucleotide
ggttccggtggcgaaccttctgaatctggtagctcaggttcctccgaaagcggttcttctgagggcggtccaggtagcgaaggttcttctggtccgggcgagtcttca

SEQ ID NO: 283 - protein, 36 aa, Artificial Sequence
  Description of Artificial Sequence: Synthetic polypeptide
GSGGEPSESGSSGSEGSSGPGESSGSGGEPSESGSS

SEQ ID NO: 284 - DNA, 108 bp, Artificial Sequence
  Description of Artificial Sequence: Synthetic polynucleotide
ggttccggtggtgaaccgtccgagtctggtagctcaggtagcgaaggttcttctggtccgggtgagtcttcaggttctggtggcgaaccgtccgaatctggtagctca

SEQ ID NO: 285 - protein, 36 aa, Artificial Sequence; identical to SEQ ID NO: 271
  Description of Artificial Sequence: Synthetic polypeptide

SEQ ID NO: 286 - DNA, 108 bp, Artificial Sequence
  Description of Artificial Sequence: Synthetic polynucleotide
ggttctggtggcgaaccgtccgaatctggtagctcaggtgaatctcctggtggttccagcggttccgagtcaggttctggtggcgaaccttccgaatctggtagctca

SEQ ID NO: 287 - protein, 36 aa, Artificial Sequence
  Description of Artificial Sequence: Synthetic polypeptide
GSSESGSSEGGPGSGGEPSESGSSGSSESGSSEGGP

SEQ ID NO: 288 - DNA, 108 bp, Artificial Sequence
  Description of Artificial Sequence: Synthetic polynucleotide
ggttcttccgaaagcggttcttccgagggcggtccaggttccggtggtgaaccatctgaatctggtagctcaggttcttctgaaagcggttcttctgaaggtggtcca

SEQ ID NO: 289 - protein, 36 aa, Artificial Sequence
  Description of Artificial Sequence: Synthetic polypeptide
GSEGSSGPGESSGESPGGSSGSESGSEGSSGPGESS

SEQ ID NO: 290 - DNA, 108 bp, Artificial Sequence
  Description of Artificial Sequence: Synthetic polynucleotide
ggtagcgaaggttcttccggtcctggtgagtcttcaggtgaatctccaggtggctctagcggttccgagtcaggtagcgaaggttcttctggtcctggcgagtcctca

SEQ ID NO: 291 - protein, 36 aa, Artificial Sequence; identical to SEQ ID NO: 261
  Description of Artificial Sequence: Synthetic polypeptide

SEQ ID NO: 292 - DNA, 108 bp, Artificial Sequence
  Description of Artificial Sequence: Synthetic polynucleotide
ggttcctctgaaagcggttcttccgaaggcggtccaggttcttccgaaagcggttcttctgagggcggtccaggttcctccgaaagcggttcttctgagggtggtcca

SEQ ID NO: 293 - protein, 36 aa, Artificial Sequence; identical to SEQ ID NO: 245
  Description of Artificial Sequence: Synthetic polypeptide

SEQ ID NO: 294 - DNA, 108 bp, Artificial Sequence
  Description of Artificial Sequence: Synthetic polynucleotide
ggttctggtggcgaaccttccgagtctggtagctcaggtgaatctccgggtggttctagcggttccgagtcaggtgaatctccgggtggttccagcggttctgagtca

SEQ ID NO: 295 - protein, 36 aa, Artificial Sequence
  Description of Artificial Sequence: Synthetic polypeptide
GSGGEPSESGSSGSEGSSGPGESSGESPGGSSGSES

SEQ ID NO: 296 - DNA, 108 bp, Artificial Sequence
  Description of Artificial Sequence: Synthetic polynucleotide
ggttctggtggcgaaccatctgagtctggtagctcaggtagcgaaggttcttccggtccaggcgagtcttcaggtgaatctcctggtggctccagcggttctgagtca

SEQ ID NO: 297 - protein, 36 aa, Artificial Sequence
  Description of Artificial Sequence: Synthetic polypeptide
GESPGGSSGSESGESPGGSSGSESGESPGGSSGSES

SEQ ID NO: 298 - DNA, 108 bp, Artificial Sequence
  Description of Artificial Sequence: Synthetic polynucleotide
ggtgaatctcctggtggttccagcggttccgagtcaggtgaatctccaggtggctctagcggttccgagtcaggtgaatctcctggtggttctagcggttctgaatca

SEQ ID NO: 299 - protein, 36 aa, Artificial Sequence
  Description of Artificial Sequence: Synthetic polypeptide
GSEGSSGPGESSGSEGSSGPGESSGSGGEPSESGSS

SEQ ID NO: 300 - DNA, 108 bp, Artificial Sequence
  Description of Artificial Sequence: Synthetic polynucleotide
ggtagcgaaggttcttccggtccaggtgaatcttcaggtagcgaaggttcttctggtcctggtgaatcctcaggttccggtggcgaaccatctgaatctggtagctca

SEQ ID NO: 301 - protein, 36 aa, Artificial Sequence; identical to SEQ ID NO: 295
  Description of Artificial Sequence: Synthetic polypeptide

SEQ ID NO: 302 - DNA, 108 bp, Artificial Sequence
  Description of Artificial Sequence: Synthetic polynucleotide
ggttctggtggcgaaccatccgaatctggtagctcaggtagcgaaggttcttctggtcctggcgaatcttcaggtgaatctccaggtggctctagcggttccgaatca

SEQ ID NO: 303 - protein, 36 aa, Artificial Sequence; identical to SEQ ID NO: 251
  Description of Artificial Sequence: Synthetic polypeptide

SEQ ID NO: 304 - DNA, 108 bp, Artificial Sequence
  Description of Artificial Sequence: Synthetic polynucleotide
ggttccggtggtgaaccgtccgaatctggtagctcaggttcctctgaaagcggttcttccgagggtggtccaggttccggtggtgaaccttctgagtctggtagctca

SEQ ID NO: 305 - protein, 36 aa, Artificial Sequence
  Description of Artificial Sequence: Synthetic polypeptide
GSSESGSSEGGPGSGGEPSESGSSGSEGSSGPGESS

SEQ ID NO: 306 - DNA, 108 bp, Artificial Sequence
  Description of Artificial Sequence: Synthetic polynucleotide
ggttcctctgaaagcggttcttctgagggcggtccaggttctggtggcgaaccatctgaatctggtagctcaggtagcgaaggttcttccggtccgggtgaatcttca

SEQ ID NO: 307 - protein, 36 aa, Artificial Sequence
  Description of Artificial Sequence: Synthetic polypeptide
GSGGEPSESGSSGSEGSSGPGESSGSEGSSGPGESS

SEQ ID NO: 308 - DNA, 108 bp, Artificial Sequence
  Description of Artificial Sequence: Synthetic polynucleotide
ggttctggtggtgaaccgtccgaatctggtagctcaggtagcgaaggttcttctggtcctggcgagtcttcaggtagcgaaggttcttctggtcctggtgaatcttca

SEQ ID NO: 309 - protein, 36 aa, Artificial Sequence; identical to SEQ ID NO: 251
  Description of Artificial Sequence: Synthetic polypeptide

SEQ ID NO: 310 - DNA, 108 bp, Artificial Sequence
  Description of Artificial Sequence: Synthetic polynucleotide
ggttctggtggcgaaccatccgagtctggtagctcaggttcttccgaaagcggttcttccgaaggcggtccaggttctggtggtgaaccgtccgaatctggtagctca

SEQ ID NO: 311 - protein, 36 aa, Artificial Sequence; identical to SEQ ID NO: 245
  Description of Artificial Sequence: Synthetic polypeptide

SEQ ID NO: 312 - DNA, 108 bp, Artificial Sequence
  Description of Artificial Sequence: Synthetic polynucleotide
ggttccggtggcgaaccttccgaatctggtagctcaggtgaatctccgggtggttctagcggttccgaatcaggtgaatctccaggtggttctagcggttccgaatca

SEQ ID NO: 313 - protein, 36 aa, Artificial Sequence
  Description of Artificial Sequence: Synthetic polypeptide
GSGGEPSESGSSGSGGEPSESGSSGESPGGSSGSES

SEQ ID NO: 314 - DNA, 108 bp, Artificial Sequence
  Description of Artificial Sequence: Synthetic polynucleotide
ggttccggtggtgaaccatctgagtctggtagctcaggttccggtggcgaaccgtccgagtctggtagctcaggtgaatctccgggtggttccagcggttccgaatca

SEQ ID NO: 315 - protein, 36 aa, Artificial Sequence
  Description of Artificial Sequence: Synthetic polypeptide
GSEGSSGPGESSGSSESGSSEGGPGSEGSSGPGESS

SEQ ID NO: 316 - DNA, 108 bp, Artificial Sequence
  Description of Artificial Sequence: Synthetic polynucleotide
ggtagcgaaggttcttctggtccgggcgaatcctcaggttcctccgaaagcggttcttccgaaggtggtccaggtagcgaaggttcttccggtcctggtgaatcttca

SEQ ID NO: 317 - protein, 36 aa, Artificial Sequence
  Description of Artificial Sequence: Synthetic polypeptide
GSSESGSSEGGPGESPGGSSGSESGESPGGSSGSES

SEQ ID NO: 318 - DNA, 108 bp, Artificial Sequence
  Description of Artificial Sequence: Synthetic polynucleotide
ggttcctctgaaagcggttcttctgaaggcggtccaggtgaatctccgggtggctccagcggttctgaatcaggtgaatctcctggtggctccagcggttccgagtca

SEQ ID NO: 319 - protein, 36 aa, Artificial Sequence; identical to SEQ ID NO: 299
  Description of Artificial Sequence: Synthetic polypeptide

SEQ ID NO: 320 - DNA, 108 bp, Artificial Sequence
  Description of Artificial Sequence: Synthetic polynucleotide
ggtagcgaaggttcttctggtccaggcgagtcttcaggtagcgaaggttcttccggtcctggcgagtcttcaggttccggtggcgaaccgtccgaatctggtagctca

SEQ ID NO: 321 - protein, 12 aa, Artificial Sequence
  Description of Artificial Sequence: Synthetic peptide
GSPAGSPTSTEE

SEQ ID NO: 322 - protein, 12 aa, Artificial Sequence
  Description of Artificial Sequence: Synthetic peptide
GSEPATSGSETP

SEQ ID NO: 323 - protein, 12 aa, Artificial Sequence
  Description of Artificial Sequence: Synthetic peptide
GTSESATPESGP

SEQ ID NO: 324 - protein, 12 aa, Artificial Sequence
  Description of Artificial Sequence: Synthetic peptide
GTSTEPSEGSAP

SEQ ID NO: 325 - DNA, 36 bp, Artificial Sequence
  Description of Artificial Sequence: Synthetic oligonucleotide
aggtagcccdgcwggytctccdacytcyacygarga

SEQ ID NO: 326 - DNA, 36 bp, Artificial Sequence
  Description of Artificial Sequence: Synthetic oligonucleotide
accttcytcrgtrgargthggagarccwgchgggct

SEQ ID NO: 327 - DNA, 36 bp, Artificial Sequence
  Description of Artificial Sequence: Synthetic oligonucleotide
aggtagcgaacckgcwacytcyggytctgaracycc

SEQ ID NO: 328 - DNA, 36 bp, Artificial Sequence
  Description of Artificial Sequence: Synthetic oligonucleotide
acctggrgtytcagarccrgargtwgcmggttcgct

SEQ ID NO: 329 - DNA, 36 bp, Artificial Sequence
  Description of Artificial Sequence: Synthetic oligonucleotide
aggtacytctgaaagcgcwacycckgartcyggycc

SEQ ID NO: 330 - DNA, 36 bp, Artificial Sequence
  Description of Artificial Sequence: Synthetic oligonucleotide
acctggrccrgaytcmggrgtwgcgctttcagargt

SEQ ID NO: 331 - DNA, 36 bp, Artificial Sequence
  Description of Artificial Sequence: Synthetic oligonucleotide
aggtacytctacygaaccktcygarggyagcgcwcc

SEQ ID NO: 332 - DNA, 36 bp, Artificial Sequence
  Description of Artificial Sequence: Synthetic oligonucleotide
acctggwgcgctrccytcrgamggttcrgtagargt

SEQ ID NO: 333 - protein, 36 aa, Artificial Sequence
  Description of Artificial Sequence: Synthetic polypeptide
GSPAGSPTSTEEGTSESATPESGPGTSTEPSEGSAP

SEQ ID NO: 334 - DNA, 108 bp, Artificial Sequence
  Description of Artificial Sequence: Synthetic polynucleotide
ggtagcccggcaggctctccgacctctactgaggaaggtacttctgaaagcgcaaccccggagtccggcccaggtacctctaccgaaccgtctgagggcagcgcacca

SEQ ID NO: 335 - protein, 36 aa, Artificial Sequence
  Description of Artificial Sequence: Synthetic polypeptide
GTSTEPSEGSAPGTSTEPSEGSAPGTSTEPSEGSAP

SEQ ID NO: 336 - DNA, 108 bp, Artificial Sequence
  Description of Artificial Sequence: Synthetic polynucleotide
ggtacttctaccgaaccgtccgaaggcagcgctccaggtacctctactgaaccttccgagggcagcgctccaggtacctctaccgaaccttctgaaggtagcgcacca

SEQ ID NO: 337 - protein, 36 aa, Artificial Sequence
  Description of Artificial Sequence: Synthetic polypeptide
GTSTEPSEGSAPGTSESATPESGPGTSESATPESGP

SEQ ID NO: 338 - DNA, 108 bp, Artificial Sequence
  Description of Artificial Sequence: Synthetic polynucleotide
ggtacctctaccgaaccgtctgaaggtagcgcaccaggtacctctgaaagcgcaactcctgagtccggtccaggtacttctgaaagcgcaaccccggagtctggccca

SEQ ID NO: 339 - protein, 36 aa, Artificial Sequence; identical to SEQ ID NO: 337
  Description of Artificial Sequence: Synthetic polypeptide

SEQ ID NO: 340 - DNA, 108 bp, Artificial Sequence
  Description of Artificial Sequence: Synthetic polynucleotide
ggtacttctactgaaccgtctgaaggtagcgcaccaggtacttctgaaagcgcaaccccggaatccggcccaggtacctctgaaagcgcaaccccggagtccggccca

SEQ ID NO: 341 - protein, 36 aa, Artificial Sequence
  Description of Artificial Sequence: Synthetic polypeptide
GSEPATSGSETPGTSESATPESGPGSPAGSPTSTEE

SEQ ID NO: 342 - DNA, 108 bp, Artificial Sequence
  Description of Artificial Sequence: Synthetic polynucleotide
ggtagcgaaccggcaacctccggctctgaaaccccaggtacctctgaaagcgctactcctgaatccggcccaggtagcccggcaggttctccgacttccactgaggaa

SEQ ID NO: 343 - protein, 36 aa, Artificial Sequence
  Description of Artificial Sequence: Synthetic polypeptide
GTSESATPESGPGSEPATSGSETPGTSTEPSEGSAP

SEQ ID NO: 344 - DNA, 108 bp, Artificial Sequence
  Description of Artificial Sequence: Synthetic polynucleotide
ggtacttctgaaagcgcaacccctgaatccggtccaggtagcgaaccggctacttctggctctgagactccaggtacttctaccgaaccgtccgaaggtagcgcacca

SEQ ID NO: 345 - protein, 36 aa, Artificial Sequence
  Description of Artificial Sequence: Synthetic polypeptide
GSPAGSPTSTEEGSPAGSPTSTEEGSEPATSGSETP

SEQ ID NO: 346 - DNA, 108 bp, Artificial Sequence
  Description of Artificial Sequence: Synthetic polynucleotide
ggtagcccggctggctctccaacctccactgaggaaggtagcccggctggctctccaacctccactgaagaaggtagcgaaccggctacctccggctctgaaactcca

SEQ ID NO: 347 - protein, 36 aa, Artificial Sequence; identical to SEQ ID NO: 333
  Description of Artificial Sequence: Synthetic polypeptide

SEQ ID NO: 348 - DNA, 108 bp, Artificial Sequence
  Description of Artificial Sequence: Synthetic polynucleotide
ggtagcccggctggctctcctacctctactgaggaaggtacttctgaaagcgctactcctgagtctggtccaggtacctctactgaaccgtccgaaggtagcgctcca

SEQ ID NO: 349 - protein, 36 aa, Artificial Sequence
  Description of Artificial Sequence: Synthetic polypeptide
GSPAGSPTSTEEGSPAGSPTSTEEGTSTEPSEGSAP

SEQ ID NO: 350 - DNA, 108 bp, Artificial Sequence
  Description of Artificial Sequence: Synthetic polynucleotide
ggtagccctgctggctctccgacttctactgaggaaggtagcccggctggttctccgacttctactgaggaaggtacttctaccgaaccttccgaaggtagcgctcca

SEQ ID NO: 351 - protein, 36 aa, Artificial Sequence
  Description of Artificial Sequence: Synthetic polypeptide
GTSESATPESGPGTSTEPSEGSAPGTSTEPSEGSAP

SEQ ID NO: 352 - DNA, 108 bp, Artificial Sequence
  Description of Artificial Sequence: Synthetic polynucleotide
ggtacttctgaaagcgctactccggagtccggtccaggtacctctaccgaaccgtccgaaggcagcgctccaggtacttctactgaaccttctgagggtagcgctcca

SEQ ID NO: 353 - protein, 36 aa, Artificial Sequence
  Description of Artificial Sequence: Synthetic polypeptide
GTSTEPSEGSAPGSPAGSPTSTEEGTSTEPSEGSAP

SEQ ID NO: 354 - DNA, 108 bp, Artificial Sequence
  Description of Artificial Sequence: Synthetic polynucleotide
ggtacctctaccgaaccttccgaaggtagcgctccaggtagcccggcaggttctcctacttccactgaggaaggtacttctaccgaaccttctgagggtagcgcacca

SEQ ID NO: 355 - protein, 36 aa, Artificial Sequence
  Description of Artificial Sequence: Synthetic polypeptide
GSEPATSGSETPGSPAGSPTSTEEGTSESATPESGP

SEQ ID NO: 356 - DNA, 108 bp, Artificial Sequence
  Description of Artificial Sequence: Synthetic polynucleotide
ggtagcgaaccggctacttccggctctgagactccaggtagccctgctggctctccgacctctaccgaagaaggtacctctgaaagcgctacccctgagtctggccca

SEQ ID NO: 357 - protein, 36 aa, Artificial Sequence; identical to SEQ ID NO: 337
  Description of Artificial Sequence: Synthetic polypeptide

SEQ ID NO: 358 - DNA, 108 bp, Artificial Sequence
  Description of Artificial Sequence: Synthetic polynucleotide
ggtacttctaccgaaccttccgagggcagcgcaccaggtacttctgaaagcgctacccctgagtccggcccaggtacttctgaaagcgctactcctgaatccggtcca

SEQ ID NO: 359 - protein, 36 aa, Artificial Sequence
  Description of Artificial Sequence: Synthetic polypeptide
GTSTEPSEGSAPGSEPATSGSETPGSPAGSPTSTEE

SEQ ID NO: 360 - DNA, 108 bp, Artificial Sequence
  Description of Artificial Sequence: Synthetic polynucleotide
ggtacttctactgaaccgtctgaaggcagcgcaccaggtagcgaaccggctacttccggttctgaaaccccaggtagcccagcaggttctccaacttctactgaagaa

SEQ ID NO: 361 - protein, 36 aa, Artificial Sequence
  Description of Artificial Sequence: Synthetic polypeptide
GSPAGSPTSTEEGTSESATPESGPGSEPATSGSETP

SEQ ID NO: 362 - DNA, 108 bp, Artificial Sequence
  Description of Artificial Sequence: Synthetic polynucleotide
ggtagccctgctggctctccaacctccaccgaagaaggtacctctgaaagcgcaacccctgaatccggcccaggtagcgaaccggcaacctccggttctgaaacccca

SEQ ID NO: 363 - protein, 36 aa, Artificial Sequence
  Description of Artificial Sequence: Synthetic polypeptide
GTSESATPESGPGSPAGSPTSTEEGSPAGSPTSTEE

SEQ ID NO: 364 - DNA, 108 bp, Artificial Sequence
  Description of Artificial Sequence: Synthetic polynucleotide
ggtacttctgaaagcgctactcctgagtccggcccaggtagcccggctggctctccgacttccaccgaggaaggtagcccggctggctctccaacttctactgaagaa

SEQ ID NO: 365 - protein, 36 aa, Artificial Sequence
  Description of Artificial Sequence: Synthetic polypeptide
GTSTEPSEGSAPGTSESATPESGPGTSTEPSEGSAP

SEQ ID NO: 366 - DNA, 108 bp, Artificial Sequence
  Description of Artificial Sequence: Synthetic polynucleotide
ggtacctctactgaaccttctgagggcagcgctccaggtacttctgaaagcgctaccccggagtccggtccaggtacttctactgaaccgtccgaaggtagcgcacca

SEQ ID NO: 367 - protein, 36 aa, Artificial Sequence
  Description of Artificial Sequence: Synthetic polypeptide
GSPAGSPTSTEEGTSTEPSEGSAPGSEPATSGSETP

SEQ ID NO: 368 - DNA, 108 bp, Artificial Sequence
  Description of Artificial Sequence: Synthetic polynucleotide
ggtagcccggcaggctctccgacttccaccgaggaaggtacctctactgaaccttctgagggtagcgctccaggtagcgaaccggcaacctctggctctgaaacccca

SEQ ID NO: 369 - protein, 36 aa, Artificial Sequence
  Description of Artificial Sequence: Synthetic polypeptide
GSPAGSPTSTEEGTSTEPSEGSAPGTSTEPSEGSAP

SEQ ID NO: 370 - DNA, 108 bp, Artificial Sequence
  Description of Artificial Sequence: Synthetic polynucleotide
ggtagcccagcaggctctccgacttccactgaggaaggtacttctactgaaccttccgaaggcagcgcaccaggtacctctactgaaccttctgagggcagcgctcca

SEQ ID NO: 371 - protein, 36 aa, Artificial Sequence; identical to SEQ ID NO: 341
  Description of Artificial Sequence: Synthetic polypeptide

SEQ ID NO: 372 - DNA, 108 bp, Artificial Sequence
  Description of Artificial Sequence: Synthetic polynucleotide
ggtagcgaacctgctacctccggttctgaaaccccaggtacctctgaaagcgcaactccggagtctggtccaggtagccctgcaggttctcctacctccactgaggaa

SEQ ID NO: 373 - protein, 36 aa, Artificial Sequence; identical to SEQ ID NO: 351
  Description of Artificial Sequence: Synthetic polypeptide

SEQ ID NO: 374 - DNA, 108 bp, Artificial Sequence
  Description of Artificial Sequence: Synthetic polynucleotide
ggtacctctgaaagcgctactccggagtctggcccaggtacctctactgaaccgtctgagggtagcgctccaggtacttctactgaaccgtccgaaggtagcgcacca

SEQ ID NO: 375 - protein, 36 aa, Artificial Sequence; identical to SEQ ID NO: 369
  Description of Artificial Sequence: Synthetic polypeptide

SEQ ID NO: 376 - DNA, 108 bp, Artificial Sequence
  Description of Artificial Sequence: Synthetic polynucleotide
ggtagcccggctggttctccgacttccaccgaggaaggtacctctactgaaccttctgagggtagcgctccaggtacctctactgaaccttccgaaggcagcgctcca

SEQ ID NO: 377 - protein, 36 aa, Artificial Sequence; identical to SEQ ID NO: 335
  Description of Artificial Sequence: Synthetic polypeptide

SEQ ID NO: 378 - DNA, 108 bp, Artificial Sequence
  Description of Artificial Sequence: Synthetic polynucleotide
ggtacttctaccgaaccgtccgagggcagcgctccaggtacttctactgaaccttctgaaggcagcgctccaggtacttctactgaaccttccgaaggtagcgcacca

SEQ ID NO: 379 - protein, 36 aa, Artificial Sequence
  Description of Artificial Sequence: Synthetic polypeptide
GSEPATSGSETPGTSESATPESGPGTSTEPSEGSAP

SEQ ID NO: 380 - DNA, 108 bp, Artificial Sequence
  Description of Artificial Sequence: Synthetic polynucleotide
ggtagcgaacctgcaacctctggctctgaaaccccaggtacctctgaaagcgctactcctgaatctggcccaggtacttctactgaaccgtccgagggcagcgcacca

SEQ ID NO: 381 - protein, 36 aa, Artificial Sequence; identical to SEQ ID NO: 353
  Description of Artificial Sequence: Synthetic polypeptide

SEQ ID NO: 382 - DNA, 108 bp, Artificial Sequence
  Description of Artificial Sequence: Synthetic polynucleotide
ggtacttctaccgaaccgtccgagggtagcgcaccaggtagcccagcaggttctcctacctccaccgaggaaggtacttctaccgaaccgtccgagggtagcgcacca

SEQ ID NO: 383 - protein, 36 aa, Artificial Sequence
  Description of Artificial Sequence: Synthetic polypeptide
GSEPATSGSETPGTSESATPESGPGSEPATSGSETP

SEQ ID NO: 384 - DNA, 108 bp, Artificial Sequence
  Description of Artificial Sequence: Synthetic polynucleotide
ggtagcgaaccggcaacctccggctctgaaactccaggtacttctgaaagcgctactccggaatccggcccaggtagcgaaccggctacttccggctctgaaacccca

SEQ ID NO: 385 - protein, 36 aa, Artificial Sequence; identical to SEQ ID NO: 383
  Description of Artificial Sequence: Synthetic polypeptide

SEQ ID NO: 386 - DNA, 108 bp, Artificial Sequence
  Description of Artificial Sequence: Synthetic polynucleotide
ggtagcgaaccggcaacttccggctctgaaaccccaggtacttctgaaagcgctactcctgagtctggcccaggtagcgaacctgctacctctggctctgaaacccca

SEQ ID NO: 387 - protein, 36 aa, Artificial Sequence
  Description of Artificial Sequence: Synthetic polypeptide
GSEPATSGSETPGSEPATSGSETPGTSTEPSEGSAP

SEQ ID NO: 388 - DNA, 108 bp, Artificial Sequence
  Description of Artificial Sequence: Synthetic polynucleotide
ggtagcgaaccggcaacctctggctctgaaactccaggtagcgaacctgcaacctccggctctgaaaccccaggtacttctactgaaccttctgagggcagcgcacca

SEQ ID NO: 389 - protein, 36 aa, Artificial Sequence
  Description of Artificial Sequence: Synthetic polypeptide
GTSESATPESGPGSEPATSGSETPGSEPATSGSETP

SEQ ID NO: 390 - DNA, 108 bp, Artificial Sequence
  Description of Artificial Sequence: Synthetic polynucleotide
ggtacttctgaaagcgctaccccggaatctggcccaggtagcgaaccggctacttctggttctgaaaccccaggtagcgaaccggctacctccggttctgaaactcca

SEQ ID NO: 391 - protein, 36 aa, Artificial Sequence
  Description of Artificial Sequence: Synthetic polypeptide
GTSTEPSEGSAPGTSTEPSEGSAPGTSESATPESGP

SEQ ID NO: 392 - DNA, 108 bp, Artificial Sequence
  Description of Artificial Sequence: Synthetic polynucleotide
ggtacctctactgaaccttccgaaggcagcgctccaggtacctctaccgaaccgtccgagggcagcgcaccaggtacttctgaaagcgcaacccctgaatccggtcca

SEQ ID NO: 393 - protein, 36 aa, Artificial Sequence
  Description of Artificial Sequence: Synthetic polypeptide
GSEPATSGSETPGTSESATPESGPGTSESATPESGP

SEQ ID NO: 394 - DNA, 108 bp, Artificial Sequence
  Description of Artificial Sequence: Synthetic polynucleotide
ggtagcgaaccggcaacctctggctctgaaaccccaggtacctctgaaagcgctactccggaatctggtccaggtacttctgaaagcgctactccggaatccggtcca

SEQ ID NO: 395 - protein, 36 aa, Artificial Sequence; identical to SEQ ID NO: 387
  Description of Artificial Sequence: Synthetic polypeptide

SEQ ID NO: 396 - DNA, 108 bp, Artificial Sequence
  Description of Artificial Sequence: Synthetic polynucleotide
ggtagcgaacctgctacctccggctctgaaactccaggtagcgaaccggctacttccggttctgaaactccaggtacctctaccgaaccttccgaaggcagcgcacca

SEQ ID NO: 397 - protein, 36 aa, Artificial Sequence
  Description of Artificial Sequence: Synthetic polypeptide
GSEPATSGSETPGTSTEPSEGSAPGSEPATSGSETP

SEQ ID NO: 398 - DNA, 108 bp, Artificial Sequence
  Description of Artificial Sequence: Synthetic polynucleotide
ggtagcgaacctgctacttctggttctgaaactccaggtacttctaccgaaccgtccgagggtagcgctccaggtagcgaacctgctacttctggttctgaaactcca

SEQ ID NO: 399 - protein, 36 aa, Artificial Sequence
  Description of Artificial Sequence: Synthetic polypeptide
GTSTEPSEGSAPGTSTEPSEGSAPGSEPATSGSETP

SEQ ID NO: 400 - DNA, 108 bp, Artificial Sequence
  Description of Artificial Sequence: Synthetic polynucleotide
ggtacctctaccgaaccgtccgagggtagcgcaccaggtacctctactgaaccgtctgagggtagcgctccaggtagcgaaccggcaacctccggttctgaaactcca

SEQ ID NO: 401 - protein, 36 aa, Artificial Sequence; identical to SEQ ID NO: 359
  Description of Artificial Sequence: Synthetic polypeptide

SEQ ID NO: 402 - DNA, 108 bp, Artificial Sequence
  Description of Artificial Sequence: Synthetic polynucleotide
ggtacttctactgaaccttccgaaggtagcgctccaggtagcgaacctgctacttctggttctgaaaccccaggtagcccggctggctctccgacctccaccgaggaa

SEQ ID NO: 403 - protein, 36 aa, Artificial Sequence; identical to SEQ ID NO: 355
  Description of Artificial Sequence: Synthetic polypeptide

SEQ ID NO: 404 - DNA, 108 bp, Artificial Sequence
  Description of Artificial Sequence: Synthetic polynucleotide
ggtagcgaaccggctacttccggctctgagactccaggtagcccagctggttctccaacctctactgaggaaggtacttctgaaagcgctacccctgaatctggtcca

SEQ ID NO: 405 - protein, 36 aa, Artificial Sequence
  Description of Artificial Sequence: Synthetic polypeptide
GTSESATPESGPGSEPATSGSETPGTSESATPESGP

SEQ ID NO: 406 - DNA, 108 bp, Artificial Sequence
  Description of Artificial Sequence: Synthetic polynucleotide
ggtacctctgaaagcgcaactcctgagtctggcccaggtagcgaacctgctacctccggctctgagactccaggtacctctgaaagcgcaaccccggaatctggtcca

SEQ ID NO: 407 - protein, 12 aa, Artificial Sequence
  Description of Artificial Sequence: Synthetic peptide
GSTSESPSGTAP

SEQ ID NO: 408 - protein, 12 aa, Artificial Sequence
  Description of Artificial Sequence: Synthetic peptide
GTSTPESGSASP

SEQ ID NO: 409 - protein, 12 aa, Artificial Sequence
  Description of Artificial Sequence: Synthetic peptide
GTSPSGESSTAP

SEQ ID NO: 410 - protein, 12 aa, Artificial Sequence
  Description of Artificial Sequence: Synthetic peptide
GSTSSTAESPGP

SEQ ID NO: 411 - DNA, 36 bp, Artificial Sequence
  Description of Artificial Sequence: Synthetic oligonucleotide
aggttctacyagcgaatcyccktctggyacygcwcc

SEQ ID NO: 412 - DNA, 36 bp, Artificial Sequence
  Description of Artificial Sequence: Synthetic oligonucleotide
acctggwgcrgtrccagamggrgattcgctrgtaga

SEQ ID NO: 413 - DNA, 36 bp, Artificial Sequence
  Description of Artificial Sequence: Synthetic oligonucleotide
aggtacytctacycckgaaagcggytcygcwtctcc

SEQ ID NO: 414 - DNA, 36 bp, Artificial Sequence
  Description of Artificial Sequence: Synthetic oligonucleotide
acctggagawgcrgarccgctttcmggrgtagargt

SEQ ID NO: 415 - DNA, 36 bp, Artificial Sequence
  Description of Artificial Sequence: Synthetic oligonucleotide
aggtacytcycckagcggygaatcttctacygcwcc

SEQ ID NO: 416 - DNA, 36 bp, Artificial Sequence
  Description of Artificial Sequence: Synthetic oligonucleotide
acctggwgcrgtagaagattcrccgctmggrgargt

SEQ ID NO: 417 - DNA, 36 bp, Artificial Sequence
  Description of Artificial Sequence: Synthetic oligonucleotide
aggttcyacyagctctacygcwgaatctcckggycc

SEQ ID NO: 418 - DNA, 36 bp, Artificial Sequence
  Description of Artificial Sequence: Synthetic oligonucleotide
acctggrccmggagattcwgcrgtagagctrgtrga

SEQ ID NO: 419 - protein, 36 aa, Artificial Sequence
  Description of Artificial Sequence: Synthetic polypeptide
GTSTPESGSASPGTSPSGESSTAPGTSPSGESSTAP

SEQ ID NO: 420 - DNA, 108 bp, Artificial Sequence
  Description of Artificial Sequence: Synthetic polynucleotide
ggtacttctactccggaaagcggttccgcatctccaggtacttctcctagcggtgaatcttctactgctccaggtacctctcctagcggcgaatcttctactgctcca

SEQ ID NO: 421 - protein, 36 aa, Artificial Sequence
  Description of Artificial Sequence: Synthetic polypeptide
GTSPSGESSTAPGSTSSTAESPGPGTSPSGESSTAP

SEQ ID NO: 422 - DNA, 108 bp, Artificial Sequence
  Description of Artificial Sequence: Synthetic polynucleotide
ggtacttctccgagcggtgaatcttctaccgcaccaggttctactagctctaccgctgaatctccgggcccaggtacttctccgagcggtgaatcttctactgctcca

SEQ ID NO: 423 - protein, 36 aa, Artificial Sequence
  Description of Artificial Sequence: Synthetic polypeptide
GSTSSTAESPGPGTSPSGESSTAPGTSTPESGSASP

SEQ ID NO: 424 - DNA, 108 bp, Artificial Sequence
  Description of Artificial Sequence: Synthetic polynucleotide
ggttccaccagctctactgctgaatctcctggtccaggtacctctcctagcggtgaatcttctactgctccaggtacttctactcctgaaagcggctctgcttctcca

SEQ ID NO: 425 - protein, 36 aa, Artificial Sequence
  Description of Artificial Sequence: Synthetic polypeptide
GSTSSTAESPGPGSTSSTAESPGPGTSPSGESSTAP

SEQ ID NO: 426 - DNA, 108 bp, Artificial Sequence
  Description of Artificial Sequence: Synthetic polynucleotide
ggttctaccagctctactgcagaatctcctggcccaggttccaccagctctaccgcagaatctccgggtccaggtacttcccctagcggtgaatcttctaccgcacca

SEQ ID NO: 427 - protein, 36 aa, Artificial Sequence; identical to SEQ ID NO: 423
  Description of Artificial Sequence: Synthetic polypeptide

SEQ ID NO: 428 - DNA, 108 bp, Artificial Sequence
  Description of Artificial Sequence: Synthetic polynucleotide
ggttctactagctctactgctgaatctcctggcccaggtacttctcctagcggtgaatcttctaccgctccaggtacctctactccggaaagcggttctgcatctcca

SEQ ID NO: 429 - protein, 36 aa, Artificial Sequence
  Description of Artificial Sequence: Synthetic polypeptide
GSTSSTAESPGPGTSTPESGSASPGSTSESPSGTAP

SEQ ID NO: 430 - DNA, 108 bp, Artificial Sequence
  Description of Artificial Sequence: Synthetic polynucleotide
ggttctaccagctctaccgcagaatctcctggtccaggtacctctactccggaaagcggctctgcatctccaggttctactagcgaatctccttctggcactgcacca

SEQ ID NO: 431 - protein, 36 aa, Artificial Sequence
  Description of Artificial Sequence: Synthetic polypeptide
GSTSSTAESPGPGTSTPESGSASPGTSTPESGSASP

SEQ ID NO: 432 - DNA, 108 bp, Artificial Sequence
  Description of Artificial Sequence: Synthetic polynucleotide
ggttctactagctctactgcagaatctcctggcccaggtacctctactccggaaagcggctctgcatctccaggtacttctacccctgaaagcggttctgcatctcca

SEQ ID NO: 433 - protein, 36 aa, Artificial Sequence
  Description of Artificial Sequence: Synthetic polypeptide
GSTSESPSGTAPGTSPSGESSTAPGSTSESPSGTAP

SEQ ID NO: 434 - DNA, 108 bp, Artificial Sequence
  Description of Artificial Sequence: Synthetic polynucleotide
ggttctaccagcgaatctccttctggcaccgctccaggtacctctcctagcggcgaatcttctaccgctccaggttctactagcgaatctccttctggcactgcacca

SEQ ID NO: 435 - protein, 36 aa, Artificial Sequence; identical to SEQ ID NO: 425
  Description of Artificial Sequence: Synthetic polypeptide

SEQ ID NO: 436 - DNA, 108 bp, Artificial Sequence
  Description of Artificial Sequence: Synthetic polynucleotide
ggttccaccagctctactgcagaatctccgggcccaggttctactagctctactgcagaatctccgggtccaggtacttctcctagcggcgaatcttctaccgctcca

SEQ ID NO: 437 - protein, 36 aa, Artificial Sequence; identical to SEQ ID NO: 429
  Description of Artificial Sequence: Synthetic polypeptide

SEQ ID NO: 438 - DNA, 108 bp, Artificial Sequence
  Description of Artificial Sequence: Synthetic polynucleotide
ggttccactagctctactgcagaatctcctggcccaggtacctctacccctgaaagcggctctgcatctccaggttctaccagcgaatccccgtctggcaccgcacca

SEQ ID NO: 439 - protein, 36 aa, Artificial Sequence; identical to SEQ ID NO: 425
  Description of Artificial Sequence: Synthetic polypeptide

SEQ ID NO: 440 - DNA, 108 bp, Artificial Sequence
  Description of Artificial Sequence: Synthetic polynucleotide
ggttctactagctctactgctgaatctccgggtccaggttctaccagctctactgctgaatctcctggtccaggtacctccccgagcggtgaatcttctactgcacca

SEQ ID NO: 441 - protein, 36 aa, Artificial Sequence
  Description of Artificial Sequence: Synthetic polypeptide
GSTSSTAESPGPGSTSESPSGTAPGSTSSTAESPGP

SEQ ID NO: 442 - DNA, 108 bp, Artificial Sequence
  Description of Artificial Sequence: Synthetic polynucleotide
ggttctaccagctctaccgctgaatctcctggcccaggttctaccagcgaatccccgtctggcaccgcaccaggttctactagctctaccgctgaatctccgggtcca

SEQ ID NO: 443 - protein, 36 aa, Artificial Sequence
  Description of Artificial Sequence: Synthetic polypeptide
GSTSSTAESPGPGSTSSTAESPGPGSTSSTAESPGP

SEQ ID NO: 444 - DNA, 108 bp, Artificial Sequence
  Description of Artificial Sequence: Synthetic polynucleotide
ggttctaccagctctaccgcagaatctcctggcccaggttccactagctctaccgctgaatctcctggtccaggttctactagctctaccgctgaatctcctggtcca

SEQ ID NO: 445 - protein, 36 aa, Artificial Sequence
  Description of Artificial Sequence: Synthetic polypeptide
GSTSESPSGTAPGSTSSTAESPGPGSTSSTAESPGP

SEQ ID NO: 446 - DNA, 108 bp, Artificial Sequence
  Description of Artificial Sequence: Synthetic polynucleotide
ggttctactagcgaatccccttctggtactgctccaggttccactagctctaccgctgaatctcctggcccaggttccactagctctactgcagaatctcctggtcca

SEQ ID NO: 447 - protein, 36 aa, Artificial Sequence
  Description of Artificial Sequence: Synthetic polypeptide
GSTSESPSGTAPGSTSESPSGTAPGSTSESPSGTAP

SEQ ID NO: 448 - DNA, 108 bp, Artificial Sequence
  Description of Artificial Sequence: Synthetic polynucleotide
ggttctactagcgaatctccttctggtaccgctccaggttctaccagcgaatccccgtctggtactgctccaggttctaccagcgaatctccttctggtactgcacca

SEQ ID NO: 449 - protein, 36 aa, Artificial Sequence; identical to SEQ ID NO: 443
  Description of Artificial Sequence: Synthetic polypeptide

SEQ ID NO: 450 - DNA, 108 bp, Artificial Sequence
  Description of Artificial Sequence: Synthetic polynucleotide
ggttccaccagctctactgctgaatctcctggcccaggttctaccagctctactgctgaatctccgggcccaggttccaccagctctaccgctgaatctccgggtcca

SEQ ID NO: 451 - protein, 36 aa, Artificial Sequence; identical to SEQ ID NO: 425
  Description of Artificial Sequence: Synthetic polypeptide

SEQ ID NO: 452 - DNA, 108 bp, Artificial Sequence
  Description of Artificial Sequence: Synthetic polynucleotide
ggttccactagctctaccgcagaatctcctggtccaggttctactagctctactgctgaatctccgggtccaggtacctcccctagcggcgaatcttctaccgctcca

SEQ ID NO: 453 - protein, 36 aa, Artificial Sequence
  Description of Artificial Sequence: Synthetic polypeptide
GSSPSASTGTGPGSSTPSGATGSPGSSTPSGATGSP

SEQ ID NO: 454 - DNA, 108 bp, Artificial Sequence
  Description of Artificial Sequence: Synthetic polynucleotide
ggttctagcccttctgcttccaccggtaccggcccaggtagctctactccgtctggtgcaactggctctccaggtagctctactccgtctggtgcaaccggctcccca

SEQ ID NO: 455 - protein, 36 aa, Artificial Sequence
  Description of Artificial Sequence: Synthetic polypeptide
GTSPSGESSTAPGTSTPESGSASPGSTSSTAESPGP

SEQ ID NO: 456 - DNA, 108 bp, Artificial Sequence
  Description of Artificial Sequence: Synthetic polynucleotide
ggtacttcccctagcggtgaatcttctactgctccaggtacctctactccggaaagcggctccgcatctccaggttctactagctctactgctgaatctcctggtcca

SEQ ID NO: 457 - protein, 36 aa, Artificial Sequence
  Description of Artificial Sequence: Synthetic polypeptide
GSTSSTAESPGPGSTSSTAESPGPGTSTPESGSASP

SEQ ID NO: 458 - DNA, 108 bp, Artificial Sequence
  Description of Artificial Sequence: Synthetic polynucleotide
ggttctactagctctaccgctgaatctccgggtccaggttctaccagctctactgcagaatctcctggcccaggtacttctactccggaaagcggttccgcttctcca

SEQ ID NO: 459 - protein, 36 aa, Artificial Sequence
  Description of Artificial Sequence: Synthetic polypeptide
GTSPSGESSTAPGSTSSTAESPGPGTSTPESGSASP

SEQ ID NO: 460 - DNA, 108 bp, Artificial Sequence
  Description of Artificial Sequence: Synthetic polynucleotide
ggtacttctcctagcggtgaatcttctaccgctccaggttctaccagctctactgctgaatctcctggcccaggtacttctaccccggaaagcggctccgcttctcca

SEQ ID NO: 461 - protein, 36 aa, Artificial Sequence; identical to SEQ ID NO: 445
  Description of Artificial Sequence: Synthetic polypeptide

SEQ ID NO: 462 - DNA, 108 bp, Artificial Sequence
  Description of Artificial Sequence: Synthetic polynucleotide
ggttctactagcgaatccccttctggtactgcaccaggttctaccagctctactgctgaatctccgggcccaggttccaccagctctaccgcagaatctcctggtcca

SEQ ID NO: 463 - protein, 36 aa, Artificial Sequence; identical to SEQ ID NO: 441
  Description of Artificial Sequence: Synthetic polypeptide

SEQ ID NO: 464 - DNA, 108 bp, Artificial Sequence
  Description of Artificial Sequence: Synthetic polynucleotide
ggttccaccagctctaccgctgaatctccgggcccaggttctaccagcgaatccccttctggcactgcaccaggttctactagctctaccgcagaatctccgggccca

SEQ ID NO: 465 - protein, 36 aa, Artificial Sequence; identical to SEQ ID NO: 423
  Description of Artificial Sequence: Synthetic polypeptide

SEQ ID NO: 466 - DNA, 108 bp, Artificial Sequence
  Description of Artificial Sequence: Synthetic polynucleotide
ggttctaccagctctactgctgaatctccgggtccaggtacttccccgagcggtgaatcttctactgcaccaggtacttctactccggaaagcggttccgcttctcca

SEQ ID NO: 467 - protein, 36 aa, Artificial Sequence
  Description of Artificial Sequence: Synthetic polypeptide
GSTSESPSGTAPGSTSESPSGTAPGTSPSGESSTAP

SEQ ID NO: 468 - DNA, 108 bp, Artificial Sequence
  Description of Artificial Sequence: Synthetic polynucleotide
ggttctaccagcgaatctccttctggcaccgctccaggttctactagcgaatccccgtctggtaccgcaccaggtacttctcctagcggcgaatcttctaccgcacca

SEQ ID NO: 469 - protein, 36 aa, Artificial Sequence
  Description of Artificial Sequence: Synthetic polypeptide
GSTSESPSGTAPGSTSESPSGTAPGTSTPESGSASP

SEQ ID NO: 470 - DNA, 108 bp, Artificial Sequence
  Description of Artificial Sequence: Synthetic polynucleotide
ggttctaccagcgaatccccttctggtactgctccaggttctaccagcgaatccccttctggcaccgcaccaggtacttctacccctgaaagcggctccgcttctcca

SEQ ID NO: 471 - protein, 36 aa, Artificial Sequence
  Description of Artificial Sequence: Synthetic polypeptide
GTSTPESGSASPGSTSSTAESPGPGSTSSTAESPGP

SEQ ID NO: 472 - DNA, 108 bp, Artificial Sequence
  Description of Artificial Sequence: Synthetic polynucleotide
ggtacctctactcctgaaagcggttctgcatctccaggttccactagctctaccgcagaatctccgggcccaggttctactagctctactgctgaatctcctggccca

SEQ ID NO: 473 - protein, 36 aa, Artificial Sequence; identical to SEQ ID NO: 467
  Description of Artificial Sequence: Synthetic polypeptide

SEQ ID NO: 474 - DNA, 108 bp, Artificial Sequence
  Description of Artificial Sequence: Synthetic polynucleotide
ggttctaccagcgaatccccttctggcactgcaccaggttctactagcgaatccccttctggtaccgcaccaggtacttctccgagcggcgaatcttctactgctcca

SEQ ID NO: 475 - protein, 36 aa, Artificial Sequence
  Description of Artificial Sequence: Synthetic polypeptide
GSTSSTAESPGPGSTSSTAESPGPGSTSESPSGTAP

SEQ ID NO: 476 - DNA, 108 bp, Artificial Sequence
  Description of Artificial Sequence: Synthetic polynucleotide
ggttctactagctctaccgctgaatctcctggcccaggttccactagctctaccgcagaatctccgggcccaggttctactagcgaatccccttctggtaccgctcca

SEQ ID NO: 477 - protein, 36 aa, Artificial Sequence; identical to SEQ ID NO: 457
  Description of Artificial Sequence: Synthetic polypeptide

SEQ ID NO: 478 - DNA, 108 bp, Artificial Sequence
  Description of Artificial Sequence: Synthetic polynucleotide
ggttccaccagctctactgcagaatctcctggcccaggttctactagctctaccgcagaatctcctggtccaggtacctctactcctgaaagcggttccgcatctcca

SEQ ID NO: 479 - protein, 36 aa, Artificial Sequence; identical to SEQ ID NO: 475
  Description of Artificial Sequence: Synthetic polypeptide

SEQ ID NO: 480 - DNA, 108 bp, Artificial Sequence
  Description of Artificial Sequence: Synthetic polynucleotide
ggttctactagctctactgctgaatctccgggcccaggttctactagctctaccgctgaatctccgggtccaggttctactagcgaatctccttctggtaccgctcca

SEQ ID NO: 481 - protein, 36 aa, Artificial Sequence
  Description of Artificial Sequence: Synthetic polypeptide
GTSPSGESSTAPGSTSESPSGTAPGSTSSTAESPGP

SEQ ID NO: 482 - DNA, 108 bp, Artificial Sequence
  Description of Artificial Sequence: Synthetic polynucleotide
ggtacctccccgagcggtgaatcttctactgcaccaggttctactagcgaatccccttctggtactgctccaggttccaccagctctactgcagaatctccgggtcca

SEQ ID NO: 483 - protein, 36 aa, Artificial Sequence
  Description of Artificial Sequence: Synthetic polypeptide
GSTSESPSGTAPGTSPSGESSTAPGSTSSTAESPGP

SEQ ID NO: 484 - DNA, 108 bp, Artificial Sequence
  Description of Artificial Sequence: Synthetic polynucleotide
ggttctactagcgaatccccgtctggtactgctccaggtacttcccctagcggtgaatcttctactgctccaggttctaccagctctaccgcagaatctccgggtcca

SEQ ID NO: 485 - protein, 36 aa, Artificial Sequence
  Description of Artificial Sequence: Synthetic polypeptide
GSTSSTAESPGPGSTSESPSGTAPGTSPSGESSTAP

SEQ ID NO: 486 - DNA, 108 bp, Artificial Sequence
  Description of Artificial Sequence: Synthetic polynucleotide
ggttctaccagctctaccgctgaatctcctggcccaggttctactagcgaatctccgtctggcaccgcaccaggtacttcccctagcggtgaatcttctactgcacca

SEQ ID NO: 487 - protein, 36 aa, Artificial Sequence; identical to SEQ ID NO: 469
  Description of Artificial Sequence: Synthetic polypeptide

SEQ ID NO: 488 - DNA, 108 bp, Artificial Sequence
  Description of Artificial Sequence: Synthetic polynucleotide
ggttctactagcgaatctccttctggcactgcaccaggttctaccagcgaatctccgtctggcactgcaccaggtacctctacccctgaaagcggttccgcttctcca

SEQ ID NO: 489 - protein, 36 aa, Artificial Sequence
  Description of Artificial Sequence: Synthetic polypeptide
GTSTPESGSASPGSTSESPSGTAPGSTSSTAESPGP

SEQ ID NO: 490 - DNA, 108 bp, Artificial Sequence
  Description of Artificial Sequence: Synthetic polynucleotide
ggtacctctactccggaaagcggttccgcatctccaggttctaccagcgaatccccgtctggcaccgcaccaggttctactagctctactgctgaatctccgggccca

SEQ ID NO: 491 - protein, 36 aa, Artificial Sequence
  Description of Artificial Sequence: Synthetic polypeptide
GSTSSTAESPGPGTSPSGESSTAPGTSPSGESSTAP

SEQ ID NO: 492 - DNA, 108 bp, Artificial Sequence
  Description of Artificial Sequence: Synthetic polynucleotide
ggttctactagctctactgcagaatctccgggcccaggtacctctcctagcggtgaatcttctaccgctccaggtacttctccgagcggtgaatcttctaccgctcca

SEQ ID NO: 493 - protein, 36 aa, Artificial Sequence
  Description of Artificial Sequence: Synthetic polypeptide
GTSPSGESSTAPGTSPSGESSTAPGTSPSGESSTAP

SEQ ID NO: 494 - DNA, 108 bp, Artificial Sequence
  Description of Artificial Sequence: Synthetic polynucleotide
ggtacctcccctagcggcgaatcttctactgctccaggtacctctcctagcggcgaatcttctaccgctccaggtacctcccctagcggtgaatcttctaccgcacca

SEQ ID NO: 495 - protein, 36 aa, Artificial Sequence; identical to SEQ ID NO: 429
  Description of Artificial Sequence: Synthetic polypeptide

SEQ ID NO: 496 - DNA, 108 bp, Artificial Sequence
  Description of Artificial Sequence: Synthetic polynucleotide
ggttccactagctctactgctgaatctcctggcccaggtacttctactccggaaagcggttccgcttctccaggttctactagcgaatctccgtctggcaccgcacca

SEQ ID NO: 497 - protein, 36 aa, Artificial Sequence
  Description of Artificial Sequence: Synthetic polypeptide
GSTSESPSGTAPGTSPSGESSTAPGTSPSGESSTAP

SEQ ID NO: 498 - DNA, 108 bp, Artificial Sequence
  Description of Artificial Sequence: Synthetic polynucleotide
ggttctactagcgaatctccgtctggcactgctccaggtacttctcctagcggtgaatcttctaccgctccaggtacttcccctagcggcgaatcttctaccgctcca

SEQ ID NO: 499 - protein, 36 aa, Artificial Sequence
  Description of Artificial Sequence: Synthetic polypeptide
GSTSESPSGTAPGTSTPESGSASPGSTSSTAESPGP

SEQ ID NO: 500 - DNA, 108 bp, Artificial Sequence
  Description of Artificial Sequence: Synthetic polynucleotide
ggttctactagcgaatctccttctggtaccgctccaggtacttctacccctgaaagcggctccgcttctccaggttccactagctctaccgctgaatctccgggtcca

SEQ ID NO: 501 - protein, 36 aa, Artificial Sequence; identical to SEQ ID NO: 475
  Description of Artificial Sequence: Synthetic polypeptide

SEQ ID NO: 502 - DNA, 108 bp, Artificial Sequence
  Description of Artificial Sequence: Synthetic polynucleotide
ggttccactagctctactgctgaatctcctggcccaggttctaccagctctaccgctgaatctcctggcccaggttctaccagcgaatctccgtctggcaccgcacca

SEQ ID NO: 503 - protein, 36 aa, Artificial Sequence
  Description of Artificial Sequence: Synthetic polypeptide
GSTSESPSGTAPGTSTPESGSASPGTSTPESGSASP

SEQ ID NO: 504 - DNA, 108 bp, Artificial Sequence
  Description of Artificial Sequence: Synthetic polynucleotide
ggttctactagcgaatccccgtctggtaccgcaccaggtacttctaccccggaaagcggctctgcttctccaggtacttctaccccggaaagcggctccgcatctcca

SEQ ID NO: 505 - protein, 36 aa, Artificial Sequence; identical to SEQ ID NO: 503
  Description of Artificial Sequence: Synthetic polypeptide

SEQ ID NO: 506 - DNA, 108 bp, Artificial Sequence
  Description of Artificial Sequence: Synthetic polynucleotide
ggttctactagcgaatccccgtctggtactgctccaggtacttctactcctgaaagcggttccgcttctccaggtacctctactccggaaagcggttctgcatctcca

SEQ ID NO: 507 - protein, 12 aa, Artificial Sequence
  Description of Artificial Sequence: Synthetic peptide
GTPGSGTASSSP

SEQ ID NO: 508 - protein, 12 aa, Artificial Sequence
  Description of Artificial Sequence: Synthetic peptide
GSSTPSGATGSP

SEQ ID NO: 509 - protein, 12 aa, Artificial Sequence
  Description of Artificial Sequence: Synthetic peptide
GSSPSASTGTGP

SEQ ID NO: 510 - protein, 12 aa, Artificial Sequence
  Description of Artificial Sequence: Synthetic peptide
GASPGTSSTGSP

SEQ ID NO: 511 - DNA, 36 bp, Artificial Sequence
  Description of Artificial Sequence: Synthetic oligonucleotide
aggtacycckggyagcggtacygcwtcttcytctcc

SEQ ID NO: 512 - DNA, 36 bp, Artificial Sequence
  Description of Artificial Sequence: Synthetic oligonucleotide
acctggagargaagawgcrgtaccgctrccmggrgt

SEQ ID NO: 513 - DNA, 36 bp, Artificial Sequence
  Description of Artificial Sequence: Synthetic oligonucleotide
aggtagctctacyccktctggtgcwacyggytcycc

SEQ ID NO: 514 - DNA, 36 bp, Artificial Sequence
  Description of Artificial Sequence: Synthetic oligonucleotide
acctggrgarccrgtwgcaccagamggrgtagagct

SEQ ID NO: 515 - DNA, 36 bp, Artificial Sequence
  Description of Artificial Sequence: Synthetic oligonucleotide
aggttctagcccktctgcwtcyacyggtacyggycc

SEQ ID NO: 516 - DNA, 36 bp, Artificial Sequence
  Description of Artificial Sequence: Synthetic oligonucleotide
acctggrccrgtaccrgtrgawgcagamgggctaga

SEQ ID NO: 517 - DNA, 36 bp, Artificial Sequence
  Description of Artificial Sequence: Synthetic oligonucleotide
aggtgcwtcycckggyacyagctctacyggttctcc

SEQ ID NO: 518 - DNA, 36 bp, Artificial Sequence
  Description of Artificial Sequence: Synthetic oligonucleotide
acctggagaaccrgtagagctrgtrccmggrgawgc

SEQ ID NO: 519 - protein, 36 aa, Artificial Sequence
  Description of Artificial Sequence: Synthetic polypeptide
GASPGTSSTGSPGTPGSGTASSSPGSSTPSGATGSP

SEQ ID NO: 520 - DNA, 108 bp, Artificial Sequence
  Description of Artificial Sequence: Synthetic polynucleotide
ggtgcatccccgggcactagctctaccggttctccaggtactcctggtagcggtactgcttcttcttctccaggtagctctactccttctggtgctactggttctcca

SEQ ID NO: 521 - protein, 36 aa, Artificial Sequence
  Description of Artificial Sequence: Synthetic polypeptide
GSSTPSGATGSPGSSPSASTGTGPGSSTPSGATGSP

SEQ ID NO: 522 - DNA, 108 bp, Artificial Sequence
  Description of Artificial Sequence: Synthetic polynucleotide
ggtagctctaccccttctggtgctaccggctctccaggttctagcccgtctgcttctaccggtaccggtccaggtagctctaccccttctggtgctactggttctcca

SEQ ID NO: 523 - protein, 36 aa, Artificial Sequence
  Description of Artificial Sequence: Synthetic polypeptide
GASPGTSSTGSPGSSPSASTGTGPGSSTPSGATGSP

SEQ ID NO: 524 - DNA, 108 bp, Artificial Sequence
  Description of Artificial Sequence: Synthetic polynucleotide
ggtgcatctccgggtactagctctaccggttctccaggttctagcccttctgcttccactggtaccggcccaggtagctctaccccgtctggtgctactggttcccca

SEQ ID NO: 525 - protein, 36 aa, Artificial Sequence
  Description of Artificial Sequence: Synthetic polypeptide
GTPGSGTASSSPGSSTPSGATGSPGASPGTSSTGSP

SEQ ID NO: 526 - DNA, 108 bp, Artificial Sequence
  Description of Artificial Sequence: Synthetic polynucleotide
ggtactccgggcagcggtactgcttcttcctctccaggtagctctaccccttctggtgcaactggttccccaggtgcatcccctggtactagctctaccggttctcca

SEQ ID NO: 527 - protein, 36 aa, Artificial Sequence
  Description of Artificial Sequence: Synthetic polypeptide
GTPGSGTASSSPGASPGTSSTGSPGSRPSASTGTGP

SEQ ID NO: 528 - DNA, 108 bp, Artificial Sequence
  Description of Artificial Sequence: Synthetic polynucleotide
ggtacccctggcagcggtactgcttcttcttctccaggtgcttcccctggtaccagctctaccggttctccaggttctagaccttctgcatccaccggtactggtcca

SEQ ID NO: 529 - protein, 36 aa, Artificial Sequence
  Description of Artificial Sequence: Synthetic polypeptide
GASPGTSSTGSPGSSTPSGATGSPGASPGTSSTGSP

SEQ ID NO: 530 - DNA, 108 bp, Artificial Sequence
  Description of Artificial Sequence: Synthetic polynucleotide
ggtgcatctcctggtaccagctctaccggttctccaggtagctctactccttctggtgctactggctctccaggtgcttccccgggtaccagctctaccggttctcca

SEQ ID NO: 531 - protein, 36 aa, Artificial Sequence
  Description of Artificial Sequence: Synthetic polypeptide
GTPGSGTASSSPGSSTPSGATGSPGSSTPSGATGSP

SEQ ID NO: 532 - DNA, 108 bp, Artificial Sequence
  Description of Artificial Sequence: Synthetic polynucleotide
ggtaccccgggcagcggtaccgcatcttcctctccaggtagctctaccccgtctggtgctaccggttccccaggtagctctaccccgtctggtgcaaccggctcccca

SEQ ID NO: 533 - protein, 36 aa, Artificial Sequence
  Description of Artificial Sequence: Synthetic polypeptide
GASPGTSSTGSPGASPGTSSTGSPGASPGTSSTGSP

SEQ ID NO: 534 - DNA, 108 bp, Artificial Sequence
  Description of Artificial Sequence: Synthetic polynucleotide
ggtgcatctccgggcactagctctactggttctccaggtgcatcccctggcactagctctactggttctccaggtgcttctcctggtaccagctctactggttctcca

SEQ ID NO: 535 - protein, 36 aa, Artificial Sequence
  Description of Artificial Sequence: Synthetic polypeptide
GSSTPSGATGSPGSSPSASTGTGPGASPGTSSTGSP

SEQ ID NO: 536 - DNA, 108 bp, Artificial Sequence
  Description of Artificial Sequence: Synthetic polynucleotide
ggtagctctactccgtctggtgcaaccggctccccaggttctagcccgtctgcttccactggtactggcccaggtgcttccccgggcaccagctctactggttctcca

SEQ ID NO: 537 - protein, 36 aa, Artificial Sequence
  Description of Artificial Sequence: Synthetic polypeptide
GSSTPSGATGSPGSSTPSGATGSPGTPGSGTASSSP

SEQ ID NO: 538 - DNA, 108 bp, Artificial Sequence
  Description of Artificial Sequence: Synthetic polynucleotide
ggtagctctactccttctggtgctaccggttccccaggtagctctactccttctggtgctactggttccccaggtactccgggcagcggtactgcttcttcctctcca

SEQ ID NO: 539 - protein, 36 aa, Artificial Sequence
  Description of Artificial Sequence: Synthetic polypeptide
GSSTPSGATGSPGSSTPSGATGSPGASPGTSSTGSP

SEQ ID NO: 540 - DNA, 108 bp, Artificial Sequence
  Description of Artificial Sequence: Synthetic polynucleotide
ggtagctctactccgtctggtgcaaccggttccccaggtagctctactccttctggtgctactggctccccaggtgcatcccctggcaccagctctaccggttctcca

SEQ ID NO: 541 - protein, 36 aa, Artificial Sequence
  Description of Artificial Sequence: Synthetic polypeptide
GTPGSGTASSSPGSSPSASTGTGPGSSTPSGATGSP

SEQ ID NO: 542 - DNA, 108 bp, Artificial Sequence
  Description of Artificial Sequence: Synthetic polynucleotide
ggtactcctggtagcggtaccgcatcttcctctccaggttctagcccttctgcatctaccggtaccggtccaggtagctctactccttctggtgctactggctctcca

SEQ ID NO: 543 - protein, 36 aa, Artificial Sequence
  Description of Artificial Sequence: Synthetic polypeptide
GASPGTSSTGSPGSSPSASTGTGPGTPGSGTASSSP

SEQ ID NO: 544 - DNA, 108 bp, Artificial Sequence
  Description of Artificial Sequence: Synthetic polynucleotide
ggtgcttccccgggcactagctctaccggttctccaggttctagcccttctgcatctactggtactggcccaggtactccgggcagcggtactgcttcttcctctcca

SEQ ID NO: 545 - protein, 36 aa, Artificial Sequence; identical to SEQ ID NO: 539
  Description of Artificial Sequence: Synthetic polypeptide

SEQ ID NO: 546 - DNA, 108 bp, Artificial Sequence
  Description of Artificial Sequence: Synthetic polynucleotide
ggtagctctactccgtctggtgctaccggctctccaggtagctctaccccttctggtgcaaccggctccccaggtgcttctccgggtaccagctctactggttctcca

SEQ ID NO: 547 - protein, 36 aa, Artificial Sequence
  Description of Artificial Sequence: Synthetic polypeptide
GTPGSGTASSSPGSSTPSGATGSPGSSPSASTGTGP

SEQ ID NO: 548 - DNA, 108 bp, Artificial Sequence
  Description of Artificial Sequence: Synthetic polynucleotide
ggtacccctggcagcggtaccgcttcttcctctccaggtagctctaccccgtctggtgctactggctctccaggttctagcccgtctgcatctaccggtaccggccca

SEQ ID NO: 549 - protein, 36 aa, Artificial Sequence
  Description of Artificial Sequence: Synthetic polypeptide
GSSTPSGATGSPGTPGSGTASSSPGTPGSGTASSSP

SEQ ID NO: 550 - DNA, 108 bp, Artificial Sequence
  Description of Artificial Sequence: Synthetic polynucleotide
ggtagctctactccttctggtgcaaccggctccccaggtaccccgggcagcggtaccgcatcttcctctccaggtactccgggtagcggtactgcttcttcttctcca

SEQ ID NO: 551 - protein, 36 aa, Artificial Sequence; identical to SEQ ID NO: 525
  Description of Artificial Sequence: Synthetic polypeptide

SEQ ID NO: 552 - DNA, 108 bp, Artificial Sequence
  Description of Artificial Sequence: Synthetic polynucleotide
ggtaccccgggtagcggtactgcttcttcctctccaggtagctctaccccttctggtgcaaccggctctccaggtgcttctccgggcaccagctctaccggttctcca

SEQ ID NO: 553 - protein, 36 aa, Artificial Sequence; identical to SEQ ID NO: 539
  Description of Artificial Sequence: Synthetic polypeptide

SEQ ID NO: 554 - DNA, 108 bp, Artificial Sequence
  Description of Artificial Sequence: Synthetic polynucleotide
ggtagctctaccccgtctggtgctaccggctctccaggtagctctaccccgtctggtgcaaccggctccccaggtgcatccccgggtactagctctaccggttctcca

SEQ ID NO: 555 - protein, 36 aa, Artificial Sequence; identical to SEQ ID NO: 519
  Description of Artificial Sequence: Synthetic polypeptide

SEQ ID NO: 556 - DNA, 108 bp, Artificial Sequence
  Description of Artificial Sequence: Synthetic polynucleotide
ggtgcttctccgggcaccagctctactggttctccaggtaccccgggcagcggtaccgcatcttcttctccaggtagctctactccttctggtgcaactggttctcca

SEQ ID NO: 557 - protein, 36 aa, Artificial Sequence
  Description of Artificial Sequence: Synthetic polypeptide
GSSPSASTGTGPGSSTPSGATGSPGTPGSGTASSSP

SEQ ID NO: 558 - DNA, 108 bp, Artificial Sequence
  Description of Artificial Sequence: Synthetic polynucleotide
ggttctagcccgtctgcttccaccggtactggcccaggtagctctaccccgtctggtgcaactggttccccaggtacccctggtagcggtaccgcttcttcttctcca

SEQ ID NO: 559 - protein, 36 aa, Artificial Sequence; identical to SEQ ID NO: 523
  Description of Artificial Sequence: Synthetic polypeptide

SEQ ID NO: 560 - DNA, 108 bp, Artificial Sequence
  Description of Artificial Sequence: Synthetic polynucleotide
ggtgcttctccgggcaccagctctactggttctccaggttctagcccttctgcatccaccggtaccggtccaggtagctctaccccttctggtgcaaccggctctcca

SEQ ID NO: 561 - protein, 36 aa, Artificial Sequence
  Description of Artificial Sequence: Synthetic polypeptide
GASPGTSSTGSPGSSTPSGATGSPGSSTPSGATGSP

SEQ ID NO: 562 - DNA, 108 bp, Artificial Sequence
  Description of Artificial Sequence: Synthetic polynucleotide
ggtgcatccccgggcaccagctctaccggttctccaggtagctctaccccgtctggtgctaccggctctccaggtagctctaccccgtctggtgctactggctctcca

SEQ ID NO: 563 - protein, 36 aa, Artificial Sequence
  Description of Artificial Sequence: Synthetic polypeptide
GTPGSGTASSSPGSSTPSGATGSPGTPGSGTASSSP

SEQ ID NO: 564 - DNA, 108 bp, Artificial Sequence
  Description of Artificial Sequence: Synthetic polynucleotide
ggtacccctggtagcggtactgcttcttcctctccaggtagctctactccgtctggtgctaccggttctccaggtaccccgggtagcggtaccgcatcttcttctcca

SEQ ID NO: 565 - protein, 36 aa, Artificial Sequence; identical to SEQ ID NO: 453
  Description of Artificial Sequence: Synthetic polypeptide

SEQ ID NO: 566 - DNA, 108 bp, Artificial Sequence
  Description of Artificial Sequence: Synthetic polynucleotide
ggttctagcccttctgcttccaccggtactggcccaggtagctctaccccttctggtgctaccggctccccaggtagctctactccttctggtgcaactggctctcca

SEQ ID NO: 567 - protein, 36 aa, Artificial Sequence
  Description of Artificial Sequence: Synthetic polypeptide
GASPGTSSTGSPGSSPSASTGTGPGSSPSASTGTGP

SEQ ID NO: 568 - DNA, 108 bp, Artificial Sequence
  Description of Artificial Sequence: Synthetic polynucleotide
ggtgcttctcctggcaccagctctactggttctccaggttctagcccttctgcttctaccggtactggtccaggttctagcccttctgcatccactggtactggtcca

SEQ ID NO: 569 - protein, 36 aa, Artificial Sequence
  Description of Artificial Sequence: Synthetic polypeptide
GTPGSGTASSSPGASPGTSSTGSPGASPGTSSTGSP

SEQ ID NO: 570 - DNA, 108 bp, Artificial Sequence
  Description of Artificial Sequence: Synthetic polynucleotide
ggtactcctggcagcggtaccgcttcttcttctccaggtgcttctcctggtactagctctactggttctccaggtgcttctccgggcactagctctactggttctcca

SEQ ID NO: 571 - protein, 36 aa, Artificial Sequence
  Description of Artificial Sequence: Synthetic polypeptide
GSSTPSGATGSPGASPGTSSTGSPGSSTPSGATGSP

SEQ ID NO: 572 - DNA, 108 bp, Artificial Sequence
  Description of Artificial Sequence: Synthetic polynucleotide
ggtagctctaccccgtctggtgctaccggttccccaggtgcttctcctggtactagctctaccggttctccaggtagctctaccccgtctggtgctactggctctcca

SEQ ID NO: 573 - protein, 36 aa, Artificial Sequence
  Description of Artificial Sequence: Synthetic polypeptide
GSSTPSGATGSPGTPGSGTASSSPGSSTPSGATGSP

SEQ ID NO: 574 - DNA, 108 bp, Artificial Sequence
  Description of Artificial Sequence: Synthetic polynucleotide
ggtagctctaccccgtctggtgctactggttctccaggtactccgggcagcggtactgcttcttcctctccaggtagctctaccccttctggtgctactggctctcca

SEQ ID NO: 575 - protein, 36 aa, Artificial Sequence; identical to SEQ ID NO: 523
  Description of Artificial Sequence: Synthetic polypeptide

SEQ ID NO: 576 - DNA, 108 bp, Artificial Sequence
  Description of Artificial Sequence: Synthetic polynucleotide
ggtgcatctcctggtaccagctctactggttctccaggttctagcccttctgcttctaccggtaccggtccaggtagctctactccttctggtgctaccggttctcca

SEQ ID NO: 577 - protein, 36 aa, Artificial Sequence
  Description of Artificial Sequence: Synthetic polypeptide
GSSTPSGATGSPGSSTPSGATGSPGSSTPSGATGSP

SEQ ID NO: 578 - DNA, 108 bp, Artificial Sequence
  Description of Artificial Sequence: Synthetic polynucleotide
ggtagctctaccccgtctggtgctactggctctccaggtagctctactccttctggtgctactggttccccaggtagctctaccccgtctggtgcaactggctctcca

SEQ ID NO: 579 - protein, 36 aa, Artificial Sequence
  Description of Artificial Sequence: Synthetic polypeptide
GASPGTSSTGSPGTPGSGTASSSPGASPGTSSTGSP

SEQ ID NO: 580 - DNA, 108 bp, Artificial Sequence
  Description of Artificial Sequence: Synthetic polynucleotide
ggtgcatccccgggtaccagctctaccggttctccaggtactcctggcagcggtactgcatcttcctctccaggtgcttctccgggcaccagctctactggttctcca

SEQ ID NO: 581 - protein, 36 aa, Artificial Sequence; identical to SEQ ID NO: 535
  Description of Artificial Sequence: Synthetic polypeptide

SEQ ID NO: 582 - DNA, 108 bp, Artificial Sequence
  Description of Artificial Sequence: Synthetic polynucleotide
ggtagctctactccttctggtgcaactggttctccaggttctagcccgtctgcatccactggtaccggtccaggtgcttcccctggcaccagctctaccggttctcca

SEQ ID NO: 583 - protein, 36 aa, Artificial Sequence
  Description of Artificial Sequence: Synthetic polypeptide
GASPGTSSTGSPGSSTPSGATGSPGSSPSASTGTGP

SEQ ID NO: 584 - DNA, 108 bp, Artificial Sequence
  Description of Artificial Sequence: Synthetic polynucleotide
ggtgcatctcctggtactagctctactggttctccaggtagctctactccgtctggtgcaaccggctctccaggttctagcccttctgcatctaccggtactggtcca

SEQ ID NO: 585 - protein, 36 aa, Artificial Sequence; identical to SEQ ID NO: 525
  Description of Artificial Sequence: Synthetic polypeptide

SEQ ID NO: 586 - DNA, 108 bp, Artificial Sequence
  Description of Artificial Sequence: Synthetic polynucleotide
ggtactcctggcagcggtaccgcatcttcctctccaggtagctctactccgtctggtgcaactggttccccaggtgcttctccgggtaccagctctaccggttctcca

SEQ ID NO: 587 - protein, 36 aa, Artificial Sequence; identical to SEQ ID NO: 573
  Description of Artificial Sequence: Synthetic polypeptide

SEQ ID NO: 588 - DNA, 108 bp, Artificial Sequence
  Description of Artificial Sequence: Synthetic polynucleotide
ggtagctctaccccgtctggtgcaaccggctccccaggtactcctggtagcggtaccgcttcttcttctccaggtagctctactccgtctggtgctaccggctcccca

SEQ ID NO: 589 - protein, 36 aa, Artificial Sequence
  Description of Artificial Sequence: Synthetic polypeptide
GSSPSASTGTGPGSSPSASTGTGPGASPGTSSTGSP

SEQ ID NO: 590 - DNA, 108 bp, Artificial Sequence
  Description of Artificial Sequence: Synthetic polynucleotide
ggttctagcccttctgcatccaccggtaccggcccaggttctagcccgtctgcttctaccggtactggtccaggtgcttctccgggtactagctctactggttctcca

SEQ ID NO: 591 - protein, 36 aa, Artificial Sequence
  Description of Artificial Sequence: Synthetic polypeptide
GTPGSGTASSSPGSSTPSGATGSPGSNPSASTGTGP

SEQ ID NO: 592 - DNA, 108 bp, Artificial Sequence
  Description of Artificial Sequence: Synthetic polynucleotide
ggtaccccgggtagcggtaccgcttcttcttctccaggtagctctactccgtctggtgctaccggctctccaggttctaacccttctgcatccaccggtaccggccca

SEQ ID NO: 593 - protein, 36 aa, Artificial Sequence
  Description of Artificial Sequence: Synthetic polypeptide
GSSPSASTGTGPGSSTPSGATGSPGASPGTSSTGSP

SEQ ID NO: 594 - DNA, 108 bp, Artificial Sequence
  Description of Artificial Sequence: Synthetic polynucleotide
ggttctagcccttctgcatctactggtactggcccaggtagctctactccttctggtgctaccggctctccaggtgcttctccgggtactagctctaccggttctcca

SEQ ID NO: 595 - protein, 36 aa, Artificial Sequence
  Description of Artificial Sequence: Synthetic polypeptide
GSSTPSGATGSPGASPGTSSTGSPGTPGSGTASSSP

SEQ ID NO: 596 - DNA, 108 bp, Artificial Sequence
  Description of Artificial Sequence: Synthetic polynucleotide
ggtagctctaccccttctggtgcaaccggctctccaggtgcatccccgggtaccagctctaccggttctccaggtactccgggtagcggtaccgcttcttcctctcca

SEQ ID NO: 597 - protein, 36 aa, Artificial Sequence; identical to SEQ ID NO: 577
  Description of Artificial Sequence: Synthetic polypeptide

SEQ ID NO: 598 - DNA, 108 bp, Artificial Sequence
  Description of Artificial Sequence: Synthetic polynucleotide
ggtagctctactccgtctggtgcaaccggttccccaggtagctctaccccttctggtgcaaccggctccccaggtagctctaccccttctggtgcaactggctctcca

SEQ ID NO: 599 - protein, 36 aa, Artificial Sequence; identical to SEQ ID NO: 519
  Description of Artificial Sequence: Synthetic polypeptide

SEQ ID NO: 600 - DNA, 108 bp, Artificial Sequence
  Description of Artificial Sequence: Synthetic polynucleotide
ggtgcttctcctggcactagctctaccggttctccaggtacccctggtagcggtaccgcatcttcctctccaggtagctctactccttctggtgctactggttcccca

SEQ ID NO: 601 - protein, 36 aa, Artificial Sequence
  Description of Artificial Sequence: Synthetic polypeptide
GSSTPSGATGSPGSSPSASTGTGPGSSPSASTGTGP

SEQ ID NO: 602 - DNA, 108 bp, Artificial Sequence
  Description of Artificial Sequence: Synthetic polynucleotide
ggtagctctaccccgtctggtgctactggctccccaggttctagcccttctgcatccaccggtaccggtccaggttctagcccgtctgcatctactggtactggtcca

SEQ ID NO: 603 - protein, 36 aa, Artificial Sequence; identical to SEQ ID NO: 567
  Description of Artificial Sequence: Synthetic polypeptide

SEQ ID NO: 604 - DNA, 108 bp, Artificial Sequence
  Description of Artificial Sequence: Synthetic polynucleotide
ggtgcttccccgggcaccagctctactggttctccaggttctagcccgtctgcttctactggtactggtccaggttctagcccttctgcttccactggtactggtcca

SEQ ID NO: 605 - protein, 36 aa, Artificial Sequence; identical to SEQ ID NO: 543
  Description of Artificial Sequence: Synthetic polypeptide

SEQ ID NO: 606 - DNA, 108 bp, Artificial Sequence
  Description of Artificial Sequence: Synthetic polynucleotide
ggtgcttccccgggtaccagctctaccggttctccaggttctagcccttctgcttctaccggtaccggtccaggtacccctggcagcggtaccgcatcttcctctcca

SEQ ID NO: 607 - DNA, 432 bp, Artificial Sequence
  Description of Artificial Sequence: Synthetic polynucleotide
ggtaccccgggcagcggtaccgcatcttcctctccaggtagctctaccccgtctggtgctaccggttccccaggtagctctaccccgtctggtgcaaccggctccccaggtagcccggctggctctcctacctctactgaggaaggtacttctgaaagcgctactcctgagtctggtccaggtacctctactgaaccgtccgaaggtagcgctccaggttctagcccttctgcatccaccggtaccggcccaggttctagcccgtctgcttctaccggtactggtccaggtgcttctccgggtactagctctactggttctccaggtacctctaccgaaccgtccgagggtagcgcaccaggtacctctactgaaccgtctgagggtagcgctccaggtagcgaaccggcaacctccggttctgaaactcca

SEQ ID NO: 608 - protein, 144 aa, Artificial Sequence
  Description of Artificial Sequence: Synthetic polypeptide
GTPGSGTASSSPGSSTPSGATGSPGSSTPSGATGSPGSPAGSPTSTEEGTSESATPESGPGTSTEPSEGSAPGSSPSASTGTGPGSSPSASTGTGPGASPGTSSTGSPGTSTEPSEGSAPGTSTEPSEGSAPGSEPATSGSETP

SEQ ID NO: 609 - DNA, 432 bp, Artificial Sequence
  Description of Artificial Sequence: Synthetic polynucleotide
ggttctaccagcgaatccccttctggcactgcaccaggttctactagcgaatccccttctggtaccgcaccaggtacttctccgagcggcgaatcttctactgctccaggtacctctactgaaccttccgaaggcagcgctccaggtacctctaccgaaccgtccgagggcagcgcaccaggtacttctgaaagcgcaacccctgaatccggtccaggtgcatctcctggtaccagctctaccggttctccaggtagctctactccttctggtgctactggctctccaggtgcttccccgggtaccagctctaccggttctccaggttctactagcgaatctccttctggcactgcaccaggttctaccagcgaatctccgtctggcactgcaccaggtacctctacccctgaaagcggttccgcttctcca

SEQ ID NO: 610 - protein, 144 aa, Artificial Sequence
  Description of Artificial Sequence: Synthetic polypeptide
GSTSESPSGTAPGSTSESPSGTAPGTSPSGESSTAPGTSTEPSEGSAPGTSTEPSEGSAPGTSESATPESGPGASPGTSSTGSPGSSTPSGATGSPGASPGTSSTGSPGSTSESPSGTAPGSTSESPSGTAPGTSTPESGSASP

SEQ ID NO: 611 - DNA, 432 bp, Artificial Sequence
  Description of Artificial Sequence: Synthetic polynucleotide
ggtacttctaccgaaccttccgagggcagcgcaccaggtacttctgaaagcgctacccctgagtccggcccaggtacttctgaaagcgctactcctgaatccggtccaggtacctctactgaaccttctgagggcagcgctccaggtacttctgaaagcgctaccccggagtccggtccaggtacttctactgaaccgtccgaaggtagcgcaccaggtacttctactgaaccttccgaaggtagcgctccaggtagcgaacctgctacttctggttctgaaaccccaggtagcccggctggctctccgacctccaccgaggaaggtgcttctcctggcaccagctctactggttctccaggttctagcccttctgcttctaccggtactggtccaggttctagcccttctgcatccactggtactggtcca

SEQ ID NO: 612 - protein, 144 aa, Artificial Sequence
  Description of Artificial Sequence: Synthetic polypeptide
GTSTEPSEGSAPGTSESATPESGPGTSESATPESGPGTSTEPSEGSAPGTSESATPESGPGTSTEPSEGSAPGTSTEPSEGSAPGSEPATSGSETPGSPAGSPTSTEEGASPGTSSTGSPGSSPSASTGTGPGSSPSASTGTGP

SEQ ID NO: 613 - DNA, 432 bp, Artificial Sequence
  Description of Artificial Sequence: Synthetic polynucleotide
ggtagcgaaccggcaacctctggctctgaaaccccaggtacctctgaaagcgctactccggaatctggtccaggtacttctgaaagcgctactccggaatccggtccaggttctaccagcgaatctccttctggcaccgctccaggttctactagcgaatccccgtctggtaccgcaccaggtacttctcctagcggcgaatcttctaccgcaccaggtgcatctccgggtactagctctaccggttctccaggttctagcccttctgcttccactggtaccggcccaggtagctctaccccgtctggtgctactggttccccaggtagctctactccgtctggtgcaaccggttccccaggtagctctactccttctggtgctactggctccccaggtgcatcccctggcaccagctctaccggttctcca

SEQ ID NO: 614 - protein, 144 aa, Artificial Sequence
  Description of Artificial Sequence: Synthetic polypeptide
GSEPATSGSETPGTSESATPESGPGTSESATPESGPGSTSESPSGTAPGSTSESPSGTAPGTSPSGESSTAPGASPGTSSTGSPGSSPSASTGTGPGSSTPSGATGSPGSSTPSGATGSPGSSTPSGATGSPGASPGTSSTGSP

SEQ ID NO: 615 - DNA, 432 bp, Artificial Sequence
  Description of Artificial Sequence: Synthetic polynucleotide
ggtgcttctccgggcaccagctctactggttctccaggttctagcccttctgcatccaccggtaccggtccaggtagctctaccccttctggtgcaaccggctctccaggtacttctgaaagcgctaccccggaatctggcccaggtagcgaaccggctacttctggttctgaaaccccaggtagcgaaccggctacctccggttctgaaactccaggtacttctgaaagcgctactccggagtccggtccaggtacctctaccgaaccgtccgaaggcagcgctccaggtacttctactgaaccttctgagggtagcgctccaggtacctctaccgaaccgtccgagggtagcgcaccaggtacctctactgaaccgtctgagggtagcgctccaggtagcgaaccggcaacctccggttctgaaactcca

SEQ ID NO: 616 - protein, 144 aa, Artificial Sequence
  Description of Artificial Sequence: Synthetic polypeptide
GASPGTSSTGSPGSSPSASTGTGPGSSTPSGATGSPGTSESATPESGPGSEPATSGSETPGSEPATSGSETPGTSESATPESGPGTSTEPSEGSAPGTSTEPSEGSAPGTSTEPSEGSAPGTSTEPSEGSAPGSEPATSGSETP

SEQ ID NO: 617 - DNA, 432 bp, Artificial Sequence
  Description of Artificial Sequence: Synthetic polynucleotide
ggtacctctaccgaaccttccgaaggtagcgctccaggtagcccggcaggttctcctacttccactgaggaaggtacttctaccgaaccttctgagggtagcgcaccaggtacctctgaaagcgcaactcctgagtctggcccaggtagcgaacctgctacctccggctctgagactccaggtacctctgaaagcgcaaccccggaatctggtccaggtagcccggctggctctcctacctctactgaggaaggtacttctgaaagcgctactcctgagtctggtccaggtacctctactgaaccgtccgaaggtagcgctccaggtagcgaacctgctacttctggttctgaaactccaggtacttctaccgaaccgtccgagggtagcgctccaggtagcgaacctgctacttctggttctgaaactcca

SEQ ID NO: 618 - protein, 144 aa, Artificial Sequence
  Description of Artificial Sequence: Synthetic polypeptide
GTSTEPSEGSAPGSPAGSPTSTEEGTSTEPSEGSAPGTSESATPESGPGSEPATSGSETPGTSESATPESGPGSPAGSPTSTEEGTSESATPESGPGTSTEPSEGSAPGSEPATSGSETPGTSTEPSEGSAPGSEPATSGSETP

SEQ ID NO: 619 - DNA, 432 bp, Artificial Sequence
  Description of Artificial Sequence: Synthetic polynucleotide
ggtacttctaccgaaccgtccgaaggcagcgctccaggtacctctactgaaccttccgagggcagcgctccaggtacctctaccgaaccttctgaaggtagcgcaccaggtacttctaccgaaccgtccgaaggcagcgctccaggtacctctactgaaccttccgagggcagcgctccaggtacctctaccgaaccttctgaaggtagcgcaccaggtacttctaccgaaccttccgagggcagcgcaccaggtacttctgaaagcgctacccctgagtccggcccaggtacttctgaaagcgctactcctgaatccggtccaggtacttctactgaaccttccgaaggtagcgctccaggtagcgaacctgctacttctggttctgaaaccccaggtagcccggctggctctccgacctccaccgaggaa

SEQ ID NO: 620 - protein, 144 aa, Artificial Sequence
  Description of Artificial Sequence: Synthetic polypeptide
GTSTEPSEGSAPGTSTEPSEGSAPGTSTEPSEGSAPGTSTEPSEGSAPGTSTEPSEGSAPGTSTEPSEGSAPGTSTEPSEGSAPGTSESATPESGPGTSESATPESGPGTSTEPSEGSAPGSEPATSGSETPGSPAGSPTSTEE

SEQ ID NO: 621 - DNA, 432 bp, Artificial Sequence
  Description of Artificial Sequence: Synthetic polynucleotide
ggtacttctaccgaaccgtccgagggcagcgctccaggtacttctactgaaccttctgaaggcagcgctccaggtacttctactgaaccttccgaaggtagcgcaccaggttctaccagcgaatccccttctggtactgctccaggttctaccagcgaatccccttctggcaccgcaccaggtacttctacccctgaaagcggctccgcttctccaggtagcgaacctgcaacctctggctctgaaaccccaggtacctctgaaagcgctactcctgaatctggcccaggtacttctactgaaccgtccgagggcagcgcaccaggtacttctactgaaccgtctgaaggtagcgcaccaggtacttctgaaagcgcaaccccggaatccggcccaggtacctctgaaagcgcaaccccggagtccggccca

SEQ ID NO: 622 - protein, 144 aa, Artificial Sequence
  Description of Artificial Sequence: Synthetic polypeptide
GTSTEPSEGSAPGTSTEPSEGSAPGTSTEPSEGSAPGSTSESPSGTAPGSTSESPSGTAPGTSTPESGSASPGSEPATSGSETPGTSESATPESGPGTSTEPSEGSAPGTSTEPSEGSAPGTSESATPESGPGTSESATPESGP

SEQ ID NO: 623 - DNA, 432 bp, Artificial Sequence
  Description of Artificial Sequence: Synthetic polynucleotide
ggtagctctaccccttctggtgctaccggctctccaggttctagcccgtctgcttctaccggtaccggtccaggtagctctaccccttctggtgctactggttctccaggtagccctgctggctctccgacttctactgaggaaggtagcccggctggttctccgacttctactgaggaaggtacttctaccgaaccttccgaaggtagcgctccaggtgcttccccgggcactagctctaccggttctccaggttctagcccttctgcatctactggtactggcccaggtactccgggcagcggtactgcttcttcctctccaggttctactagctctactgctgaatctcctggcccaggtacttctcctagcggtgaatcttctaccgctccaggtacctctactccggaaagcggttctgcatctcca

SEQ ID NO: 624 - protein, 144 aa, Artificial Sequence
  Description of Artificial Sequence: Synthetic polypeptide
GSSTPSGATGSPGSSPSASTGTGPGSSTPSGATGSPGSPAGSPTSTEEGSPAGSPTSTEEGTSTEPSEGSAPGASPGTSSTGSPGSSPSASTGTGPGTPGSGTASSSPGSTSSTAESPGPGTSPSGESSTAPGTSTPESGSASP

SEQ ID NO: 625 - DNA, 432 bp, Artificial Sequence
  Description of Artificial Sequence: Synthetic polynucleotide
ggtacctctactgaaccttctgagggcagcgctccaggtacttctgaaagcgctaccccggagtccggtccaggtacttctactgaaccgtccgaaggtagcgcaccaggtacttctactgaaccgtctgaaggtagcgcaccaggtacttctgaaagcgcaaccccggaatccggcccaggtacctctgaaagcgcaaccccggagtccggcccaggtactcctggcagcggtaccgcttcttcttctccaggtgcttctcctggtactagctctactggttctccaggtgcttctccgggcactagctctactggttctccaggtagccctgctggctctccgacttctactgaggaaggtagcccggctggttctccgacttctactgaggaaggtacttctaccgaaccttccgaaggtagcgctcca

SEQ ID NO: 626 - protein, 144 aa, Artificial Sequence
  Description of Artificial Sequence: Synthetic polypeptide
GTSTEPSEGSAPGTSESATPESGPGTSTEPSEGSAPGTSTEPSEGSAPGTSESATPESGPGTSESATPESGPGTPGSGTASSSPGASPGTSSTGSPGASPGTSSTGSPGSPAGSPTSTEEGSPAGSPTSTEEGTSTEPSEGSAP

SEQ ID NO: 627 - DNA, 432 bp, Artificial Sequence
  Description of Artificial Sequence: Synthetic polynucleotide
ggtagcccagcaggctctccgacttccactgaggaaggtacttctactgaaccttccgaaggcagcgcaccaggtacctctactgaaccttctgagggcagcgctccaggtacctctaccgaaccgtctgaaggtagcgcaccaggtacctctgaaagcgcaactcctgagtccggtccaggtacttctgaaagcgcaaccccggagtctggcccaggtaccccgggtagcggtactgcttcttcctctccaggtagctctaccccttctggtgcaaccggctctccaggtgcttctccgggcaccagctctaccggttctccaggtacctctactgaaccttctgagggcagcgctccaggtacttctgaaagcgctaccccggagtccggtccaggtacttctactgaaccgtccgaaggtagcgcacca

SEQ ID NO: 628 - protein, 144 aa, Artificial Sequence
  Description of Artificial Sequence: Synthetic polypeptide
GSPAGSPTSTEEGTSTEPSEGSAPGTSTEPSEGSAPGTSTEPSEGSAPGTSESATPESGPGTSESATPESGPGTPGSGTASSSPGSSTPSGATGSPGASPGTSSTGSPGTSTEPSEGSAPGTSESATPESGPGTSTEPSEGSAP

SEQ ID NO: 629 - DNA, 432 bp, Artificial Sequence
  Description of Artificial Sequence: Synthetic polynucleotide
ggtagcgaaccggcaacctccggctctgaaactccaggtacttctgaaagcgctactccggaatccggcccaggtagcgaaccggctacttccggctctgaaaccccaggtagctctaccccgtctggtgcaaccggctccccaggtactcctggtagcggtaccgcttcttcttctccaggtagctctactccgtctggtgctaccggctccccaggtgcatctcctggtaccagctctaccggttctccaggtagctctactccttctggtgctactggctctccaggtgcttccccgggtaccagctctaccggttctccaggtagcgaacctgctacttctggttctgaaactccaggtacttctaccgaaccgtccgagggtagcgctccaggtagcgaacctgctacttctggttctgaaactcca

SEQ ID NO: 630 - protein, 144 aa, Artificial Sequence
  Description of Artificial Sequence: Synthetic polypeptide
GSEPATSGSETPGTSESATPESGPGSEPATSGSETPGSSTPSGATGSPGTPGSGTASSSPGSSTPSGATGSPGASPGTSSTGSPGSSTPSGATGSPGASPGTSSTGSPGSEPATSGSETPGTSTEPSEGSAPGSEPATSGSETP

SEQ ID NO: 631 - DNA, 432 bp, Artificial Sequence
  Description of Artificial Sequence: Synthetic polynucleotide
ggtacctctactgaaccttccgaaggcagcgctccaggtacctctaccgaaccgtccgagggcagcgcaccaggtacttctgaaagcgcaacccctgaatccggtccaggtagccctgctggctctccgacttctactgaggaaggtagcccggctggttctccgacttctactgaggaaggtacttctaccgaaccttccgaaggtagcgctccaggtagcccggctggttctccgacttccaccgaggaaggtacctctactgaaccttctgagggtagcgctccaggtacctctactgaaccttccgaaggcagcgctccaggtgcttccccgggcaccagctctactggttctccaggttctagcccgtctgcttctactggtactggtccaggttctagcccttctgcttccactggtactggtcca

SEQ ID NO: 632 - protein, 144 aa, Artificial Sequence
  Description of Artificial Sequence: Synthetic polypeptide
GTSTEPSEGSAPGTSTEPSEGSAPGTSESATPESGPGSPAGSPTSTEEGSPAGSPTSTEEGTSTEPSEGSAPGSPAGSPTSTEEGTSTEPSEGSAPGTSTEPSEGSAPGASPGTSSTGSPGSSPSASTGTGPGSSPSASTGTGP

SEQ ID NO: 633 - DNA, 432 bp, Artificial Sequence
  Description of Artificial Sequence: Synthetic polynucleotide
ggtagctctaccccgtctggtgctaccggttccccaggtgcttctcctggtactagctctaccggttctccaggtagctctaccccgtctggtgctactggctctccaggtagccctgctggctctccaacctccaccgaagaaggtacctctgaaagcgcaacccctgaatccggcccaggtagcgaaccggcaacctccggttctgaaaccccaggtgcatctcctggtactagctctactggttctccaggtagctctactccgtctggtgcaaccggctctccaggttctagcccttctgcatctaccggtactggtccaggttctaccagcgaatccccttctggtactgctccaggttctaccagcgaatccccttctggcaccgcaccaggtacttctacccctgaaagcggctccgcttctcca

SEQ ID NO: 634 - protein, 144 aa, Artificial Sequence
  Description of Artificial Sequence: Synthetic polypeptide
GSSTPSGATGSPGASPGTSSTGSPGSSTPSGATGSPGSPAGSPTSTEEGTSESATPESGPGSEPATSGSETPGASPGTSSTGSPGSSTPSGATGSPGSSPSASTGTGPGSTSESPSGTAPGSTSESPSGTAPGTSTPESGSASP

SEQ ID NO: 635 - DNA, 432 bp, Artificial Sequence
  Description of Artificial Sequence: Synthetic polynucleotide
ggttctaccagcgaatctccttctggcaccgctccaggttctactagcgaatccccgtctggtaccgcaccaggtacttctcctagcggcgaatcttctaccgcaccaggtacctctgaaagcgctactccggagtctggcccaggtacctctactgaaccgtctgagggtagcgctccaggtacttctactgaaccgtccgaaggtagcgcaccaggtacctctactgaaccttctgagggcagcgctccaggtacttctgaaagcgctaccccggagtccggtccaggtacttctactgaaccgtccgaaggtagcgcaccaggtagctctaccccgtctggtgctaccggttccccaggtgcttctcctggtactagctctaccggttctccaggtagctctaccccgtctggtgctactggctctcca

SEQ ID NO: 636 - protein, 144 aa, Artificial Sequence
  Description of Artificial Sequence: Synthetic polypeptide
GSTSESPSGTAPGSTSESPSGTAPGTSPSGESSTAPGTSESATPESGPGTSTEPSEGSAPGTSTEPSEGSAPGTSTEPSEGSAPGTSESATPESGPGTSTEPSEGSAPGSSTPSGATGSPGASPGTSSTGSPGSSTPSGATGSP

SEQ ID NO: 637 - DNA, 432 bp, Artificial Sequence
  Description of Artificial Sequence: Synthetic polynucleotide
ggttctactagctctactgcagaatctccgggcccaggtacctctcctagcggtgaatcttctaccgctccaggtacttctccgagcggtgaatcttctaccgctccaggttctactagctctaccgctgaatctccgggtccaggttctaccagctctactgcagaatctcctggcccaggtacttctactccggaaagcggttccgcttctccaggtacttctcctagcggtgaatcttctaccgctccaggttctaccagctctactgctgaatctcctggcccaggtacttctaccccggaaagcggctccgcttctccaggttctaccagctctaccgctgaatctcctggcccaggttctactagcgaatctccgtctggcaccgcaccaggtacttcccctagcggtgaatcttctactgcacca

SEQ ID NO: 638 - protein, 144 aa, Artificial Sequence
  Description of Artificial Sequence: Synthetic polypeptide
GSTSSTAESPGPGTSPSGESSTAPGTSPSGESSTAPGSTSSTAESPGPGSTSSTAESPGPGTSTPESGSASPGTSPSGESSTAPGSTSSTAESPGPGTSTPESGSASPGSTSSTAESPGPGSTSESPSGTAPGTSPSGESSTAP

SEQ ID NO: 639 - DNA, 432 bp, Artificial Sequence
  Description of Artificial Sequence: Synthetic polynucleotide
ggtacctctactccggaaagcggttccgcatctccaggttctaccagcgaatccccgtctggcaccgcaccaggttctactagctctactgctgaatctccgggcccaggtacctctactgaaccttccgaaggcagcgctccaggtacctctaccgaaccgtccgagggcagcgcaccaggtacttctgaaagcgcaacccctgaatccggtccaggtacctctgaaagcgctactccggagtctggcccaggtacctctactgaaccgtctgagggtagcgctccaggtacttctactgaaccgtccgaaggtagcgcaccaggtacttctgaaagcgctactccggagtccggtccaggtacctctaccgaaccgtccgaaggcagcgctccaggtacttctactgaaccttctgagggtagcgctccc

SEQ ID NO: 640 - protein, 144 aa, Artificial Sequence
  Description of Artificial Sequence: Synthetic polypeptide
GTSTPESGSASPGSTSESPSGTAPGSTSSTAESPGPGTSTEPSEGSAPGTSTEPSEGSAPGTSESATPESGPGTSESATPESGPGTSTEPSEGSAPGTSTEPSEGSAPGTSESATPESGPGTSTEPSEGSAPGTSTEPSEGSAP

SEQ ID NO: 641 - DNA, 432 bp, Artificial Sequence
  Description of Artificial Sequence: Synthetic polynucleotide
ggtacctctaccgaaccgtccgagggtagcgcaccaggtacctctactgaaccgtctgagggtagcgctccaggtagcgaaccggcaacctccggttctgaaactccaggtacttctactgaaccgtctgaaggtagcgcaccaggtacttctgaaagcgcaaccccggaatccggcccaggtacctctgaaagcgcaaccccggagtccggcccaggtgcatctccgggtactagctctaccggttctccaggttctagcccttctgcttccactggtaccggcccaggtagctctaccccgtctggtgctactggttccccaggtagctctactccgtctggtgcaaccggttccccaggtagctctactccttctggtgctactggctccccaggtgcatcccctggcaccagctctaccggttctcca

SEQ ID NO: 642 - protein, 144 aa, Artificial Sequence
  Description of Artificial Sequence: Synthetic polypeptide
GTSTEPSEGSAPGTSTEPSEGSAPGSEPATSGSETPGTSTEPSEGSAPGTSESATPESGPGTSESATPESGPGASPGTSSTGSPGSSPSASTGTGPGSSTPSGATGSPGSSTPSGATGSPGSSTPSGATGSPGASPGTSSTGSP

SEQ ID NO: 643 - DNA, 432 bp, Artificial Sequence
  Description of Artificial Sequence: Synthetic polynucleotide
ggtagcgaaccggcaacctctggctctgaaactccaggtagcgaacctgcaacctccggctctgaaaccccaggtacttctactgaaccttctgagggcagcgcaccaggtagcgaacctgcaacctctggctctgaaaccccaggtacctctgaaagcgctactcctgaatctggcccaggtacttctactgaaccgtccgagggcagcgcaccaggtagctctactccgtctggtgctaccggctctccaggtagctctaccccttctggtgcaaccggctccccaggtgcttctccgggtaccagctctactggttctccaggtagctctaccccgtctggtgctaccggttccccaggtgcttctcctggtactagctctaccggttctccaggtagctctaccccgtctggtgctactggctctcca

SEQ ID NO: 644 - protein, 144 aa, Artificial Sequence
  Description of Artificial Sequence: Synthetic polypeptide
GSEPATSGSETPGSEPATSGSETPGTSTEPSEGSAPGSEPATSGSETPGTSESATPESGPGTSTEPSEGSAPGSSTPSGATGSPGSSTPSGATGSPGASPGTSSTGSPGSSTPSGATGSPGASPGTSSTGSPGSSTPSGATGSP

SEQ ID NO: 645 - DNA, 432 bp, Artificial Sequence
  Description of Artificial Sequence: Synthetic polynucleotide
ggtacttctaccgaaccgtccgagggcagcgctccaggtacttctactgaaccttctgaaggcagcgctccaggtacttctactgaaccttccgaaggtagcgcaccaggtacttctgaaagcgctactccggagtccggtccaggtacctctaccgaaccgtccgaaggcagcgctccaggtacttctactgaaccttctgagggtagcgctccaggttctactagcgaatctccgtctggcactgctccaggtacttctcctagcggtgaatcttctaccgctccaggtacttcccctagcggcgaatcttctaccgctccaggtagcccggctggctctcctacctctactgaggaaggtacttctgaaagcgctactcctgagtctggtccaggtacctctactgaaccgtccgaaggtagcgctcca

SEQ ID NO: 646 - protein, 144 aa, Artificial Sequence
  Description of Artificial Sequence: Synthetic polypeptide
GTSTEPSEGSAPGTSTEPSEGSAPGTSTEPSEGSAPGTSESATPESGPGTSTEPSEGSAPGTSTEPSEGSAPGSTSESPSGTAPGTSPSGESSTAPGTSPSGESSTAPGSPAGSPTSTEEGTSESATPESGPGTSTEPSEGSAP

SEQ ID NO: 647 - DNA, 432 bp, Artificial Sequence
  Description of Artificial Sequence: Synthetic polynucleotide
ggtacttctactgaaccttccgaaggtagcgctccaggtagcgaacctgctacttctggttctgaaaccccaggtagcccggctggctctccgacctccaccgaggaaggtagcccggcaggctctccgacctctactgaggaaggtacttctgaaagcgcaaccccggagtccggcccaggtacctctaccgaaccgtctgagggcagcgcaccaggtacctctactgaaccttccgaaggcagcgctccaggtacctctaccgaaccgtccgagggcagcgcaccaggtacttctgaaagcgcaacccctgaatccggtccaggtagctctactccgtctggtgcaaccggctccccaggttctagcccgtctgcttccactggtactggcccaggtgcttccccgggcaccagctctactggttctcca

SEQ ID NO: 648 - protein, 144 aa, Artificial Sequence
  Description of Artificial Sequence: Synthetic polypeptide
GTSTEPSEGSAPGSEPATSGSETPGSPAGSPTSTEEGSPAGSPTSTEEGTSESATPESGPGTSTEPSEGSAPGTSTEPSEGSAPGTSTEPSEGSAPGTSESATPESGPGSSTPSGATGSPGSSPSASTGTGPGASPGTSSTGSP

SEQ ID NO: 649 - DNA, 432 bp, Artificial Sequence
  Description of Artificial Sequence: Synthetic polynucleotide
ggtagcgaaccggctacttccggctctgagactccaggtagccctgctggctctccgacctctaccgaagaaggtacctctgaaagcgctacccctgagtctggcccaggtacctctactgaaccttccgaaggcagcgctccaggtacctctaccgaaccgtccgagggcagcgcaccaggtacttctgaaagcgcaacccctgaatccggtccaggtacctctactccggaaagcggttccgcatctccaggttctaccagcgaatccccgtctggcaccgcaccaggttctactagctctactgctgaatctccgggcccaggtacttctgaaagcgctactccggagtccggtccaggtacctctaccgaaccgtccgaaggcagcgctccaggtacttctactgaaccttctgagggtagcgctcca

SEQ ID NO: 650 - protein, 144 aa, Artificial Sequence
  Description of Artificial Sequence: Synthetic polypeptide
GSEPATSGSETPGSPAGSPTSTEEGTSESATPESGPGTSTEPSEGSAPGTSTEPSEGSAPGTSESATPESGPGTSTPESGSASPGSTSESPSGTAPGSTSSTAESPGPGTSESATPESGPGTSTEPSEGSAPGTSTEPSEGSAP

SEQ ID NO: 651 - DNA, 432 bp, Artificial Sequence
  Description of Artificial Sequence: Synthetic polynucleotide
ggtacttctaccgaaccgtccgagggcagcgctccaggtacttctactgaaccttctgaaggcagcgctccaggtacttctactgaaccttccgaaggtagcgcaccaggtacctctaccgaaccgtctgaaggtagcgcaccaggtacctctgaaagcgcaactcctgagtccggtccaggtacttctgaaagcgcaaccccggagtctggcccaggtactcctggcagcggtaccgcatcttcctctccaggtagctctactccgtctggtgcaactggttccccaggtgcttctccgggtaccagctctaccggttctccaggttccaccagctctactgctgaatctcctggtccaggtacctctcctagcggtgaatcttctactgctccaggtacttctactcctgaaagcggctctgcttctcca

SEQ ID NO: 652 - protein, 144 aa, Artificial Sequence
  Description of Artificial Sequence: Synthetic polypeptide
GTSTEPSEGSAPGTSTEPSEGSAPGTSTEPSEGSAPGTSTEPSEGSAPGTSESATPESGPGTSESATPESGPGTPGSGTASSSPGSSTPSGATGSPGASPGTSSTGSPGSTSSTAESPGPGTSPSGESSTAPGTSTPESGSASP

SEQ ID NO: 653 - DNA, 432 bp, Artificial Sequence
  Description of Artificial Sequence: Synthetic polynucleotide
ggtagcccggcaggctctccgacctctactgaggaaggtacttctgaaagcgcaaccccggagtccggcccaggtacctctaccgaaccgtctgagggcagcgcaccaggtacttctgaaagcgcaacccctgaatccggtccaggtagcgaaccggctacttctggctctgagactccaggtacttctaccgaaccgtccgaaggtagcgcaccaggtagcccggctggttctccgacttccaccgaggaaggtacctctactgaaccttctgagggtagcgctccaggtacctctactgaaccttccgaaggcagcgctccaggtacttctaccgaaccgtccgagggcagcgctccaggtacttctactgaaccttctgaaggcagcgctccaggtacttctactgaaccttccgaaggtagcgcacca

SEQ ID NO: 654 - protein, 144 aa, Artificial Sequence
  Description of Artificial Sequence: Synthetic polypeptide
GSPAGSPTSTEEGTSESATPESGPGTSTEPSEGSAPGTSESATPESGPGSEPATSGSETPGTSTEPSEGSAPGSPAGSPTSTEEGTSTEPSEGSAPGTSTEPSEGSAPGTSTEPSEGSAPGTSTEPSEGSAPGTSTEPSEGSAP

SEQ ID NO: 655 - DNA, 432 bp, Artificial Sequence
  Description of Artificial Sequence: Synthetic polynucleotide
ggtacttctccgagcggtgaatcttctaccgcaccaggttctactagctctaccgctgaatctccgggcccaggtacttctccgagcggtgaatcttctactgctccaggtacctctgaaagcgctactccggagtctggcccaggtacctctactgaaccgtctgagggtagcgctccaggtacttctactgaaccgtccgaaggtagcgcaccaggttctagcccttctgcatctactggtactggcccaggtagctctactccttctggtgctaccggctctccaggtgcttctccgggtactagctctaccggttctccaggtacttctactccggaaagcggttccgcatctccaggtacttctcctagcggtgaatcttctactgctccaggtacctctcctagcggcgaatcttctactgctcca

SEQ ID NO: 656 - protein, 144 aa, Artificial Sequence
  Description of Artificial Sequence: Synthetic polypeptide
GTSPSGESSTAPGSTSSTAESPGPGTSPSGESSTAPGTSESATPESGPGTSTEPSEGSAPGTSTEPSEGSAPGSSPSASTGTGPGSSTPSGATGSPGASPGTSSTGSPGTSTPESGSASPGTSPSGESSTAPGTSPSGESSTAP

SEQ ID NO: 657 - DNA, 432 bp, Artificial Sequence
  Description of Artificial Sequence: Synthetic polynucleotide
ggtacctctgaaagcgctactccggagtctggcccaggtacctctactgaaccgtctgagggtagcgctccaggtacttctactgaaccgtccgaaggtagcgcaccaggtagccctgctggctctccgacttctactgaggaaggtagcccggctggttctccgacttctactgaggaaggtacttctaccgaaccttccgaaggtagcgctccaggttctagcccttctgcttccaccggtactggcccaggtagctctaccccttctggtgctaccggctccccaggtagctctactccttctggtgcaactggctctccaggtagcgaaccggcaacttccggctctgaaaccccaggtacttctgaaagcgctactcctgagtctggcccaggtagcgaacctgctacctctggctctgaaacccca

SEQ ID NO: 658 - protein, 144 aa, Artificial Sequence
  Description of Artificial Sequence: Synthetic polypeptide
GTSESATPESGPGTSTEPSEGSAPGTSTEPSEGSAPGSPAGSPTSTEEGSPAGSPTSTEEGTSTEPSEGSAPGSSPSASTGTGPGSSTPSGATGSPGSSTPSGATGSPGSEPATSGSETPGTSESATPESGPGSEPATSGSETP

SEQ ID NO: 659 - DNA, 432 bp, Artificial Sequence
  Description of Artificial Sequence: Synthetic polynucleotide
ggtacttctaccgaaccgtccgaaggcagcgctccaggtacctctactgaaccttccgagggcagcgctccaggtacctctaccgaaccttctgaaggtagcgcaccaggtagctctaccccgtctggtgctaccggttccccaggtgcttctcctggtactagctctaccggttctccaggtagctctaccccgtctggtgctactggctctccaggtacttctgaaagcgcaacccctgaatccggtccaggtagcgaaccggctacttctggctctgagactccaggtacttctaccgaaccgtccgaaggtagcgcaccaggttctactagcgaatctccttctggcactgcaccaggttctaccagcgaatctccgtctggcactgcaccaggtacctctacccctgaaagcggttccgcttctcca

SEQ ID NO: 660 - protein, 144 aa, Artificial Sequence
  Description of Artificial Sequence: Synthetic polypeptide
GTSTEPSEGSAPGTSTEPSEGSAPGTSTEPSEGSAPGSSTPSGATGSPGASPGTSSTGSPGSSTPSGATGSPGTSESATPESGPGSEPATSGSETPGTSTEPSEGSAPGSTSESPSGTAPGSTSESPSGTAPGTSTPESGSASP

SEQ ID NO: 661 - DNA, 432 bp, Artificial Sequence
  Description of Artificial Sequence: Synthetic polynucleotide
ggtacctctactcctgaaagcggttctgcatctccaggttccactagctctaccgcagaatctccgggcccaggttctactagctctactgctgaatctcctggcccaggttctagcccttctgcatctactggtactggcccaggtagctctactccttctggtgctaccggctctccaggtgcttctccgggtactagctctaccggttctccaggtagcgaaccggcaacctccggctctgaaaccccaggtacctctgaaagcgctactcctgaatccggcccaggtagcccggcaggttctccgacttccactgaggaaggttctactagcgaatctccttctggcactgcaccaggttctaccagcgaatctccgtctggcactgcaccaggtacctctacccctgaaagcggttccgcttctccc

SEQ ID NO: 662 - protein, 144 aa, Artificial Sequence
  Description of Artificial Sequence: Synthetic polypeptide
GTSTPESGSASPGSTSSTAESPGPGSTSSTAESPGPGSSPSASTGTGPGSSTPSGATGSPGASPGTSSTGSPGSEPATSGSETPGTSESATPESGPGSPAGSPTSTEEGSTSESPSGTAPGSTSESPSGTAPGTSTPESGSASP

SEQ ID NO: 663 - DNA, 432 bp, Artificial Sequence
  Description of Artificial Sequence: Synthetic polynucleotide
ggtagcccggctggctctcctacctctactgaggaaggtacttctgaaagcgctactcctgagtctggtccaggtacctctactgaaccgtccgaaggtagcgctccaggttctaccagcgaatctccttctggcaccgctccaggttctactagcgaatccccgtctggtaccgcaccaggtacttctcctagcggcgaatcttctaccgcaccaggtacctctaccgaaccttccgaaggtagcgctccaggtagcccggcaggttctcctacttccactgaggaaggtacttctaccgaaccttctgagggtagcgcaccaggtagcgaacctgcaacctctggctctgaaaccccaggtacctctgaaagcgctactcctgaatctggcccaggtacttctactgaaccgtccgagggcagcgcacca

SEQ ID NO: 664 - protein, 144 aa, Artificial Sequence
  Description of Artificial Sequence: Synthetic polypeptide
GSPAGSPTSTEEGTSESATPESGPGTSTEPSEGSAPGSTSESPSGTAPGSTSESPSGTAPGTSPSGESSTAPGTSTEPSEGSAPGSPAGSPTSTEEGTSTEPSEGSAPGSEPATSGSETPGTSESATPESGPGTSTEPSEGSAP

SEQ ID NO: 665 - DNA, 432 bp, Artificial Sequence
  Description of Artificial Sequence: Synthetic polynucleotide
ggtacctctaccgaaccttccgaaggtagcgctccaggtagcccggcaggttctcctacttccactgaggaaggtacttctaccgaaccttctgagggtagcgcaccaggtacctcccctagcggcgaatcttctactgctccaggtacctctcctagcggcgaatcttctaccgctccaggtacctcccctagcggtgaatcttctaccgcaccaggttctaccagcgaatccccttctggtactgctccaggttctaccagcgaatccccttctggcaccgcaccaggtacttctacccctgaaagcggctccgcttctccaggtagcgaacctgcaacctctggctctgaaaccccaggtacctctgaaagcgctactcctgaatctggcccaggtacttctactgaaccgtccgagggcagcgcacca

SEQ ID NO: 666 - protein, 144 aa, Artificial Sequence
  Description of Artificial Sequence: Synthetic polypeptide
GTSTEPSEGSAPGSPAGSPTSTEEGTSTEPSEGSAPGTSPSGESSTAPGTSPSGESSTAPGTSPSGESSTAPGSTSESPSGTAPGSTSESPSGTAPGTSTPESGSASPGSEPATSGSETPGTSESATPESGPGTSTEPSEGSAP

SEQ ID NO: 667 - DNA, 432 bp, Artificial Sequence
  Description of Artificial Sequence: Synthetic polynucleotide
ggtagcgaaccggcaacctctggctctgaaaccccaggtacctctgaaagcgctactccggaatctggtccaggtacttctgaaagcgctactccggaatccggtccaggtacttctccgagcggtgaatcttctaccgcaccaggttctactagctctaccgctgaatctccgggcccaggtacttctccgagcggtgaatcttctactgctccaggttctactagcgaatccccgtctggtactgctccaggtacttcccctagcggtgaatcttctactgctccaggttctaccagctctaccgcagaatctccgggtccaggtagctctactccgtctggtgcaaccggttccccaggtagctctaccccttctggtgcaaccggctccccaggtagctctaccccttctggtgcaaactggctctcc

SEQ ID NO: 668 - protein, 144 aa, Artificial Sequence
  Description of Artificial Sequence: Synthetic polypeptide
GSEPATSGSETPGTSESATPESGPGTSESATPESGPGTSPSGESSTAPGSTSSTAESPGPGTSPSGESSTAPGSTSESPSGTAPGTSPSGESSTAPGSTSSTAESPGPGSSTPSGATGSPGSSTPSGATGSPGSSTPSGANWLS

SEQ ID NO: 669 - DNA, 432 bp, Artificial Sequence
  Description of Artificial Sequence: Synthetic polynucleotide
ggtagccctgctggctctccgacttctactgaggaaggtagcccggctggttctccgacttctactgaggaaggtacttctaccgaaccttccgaaggtagcgctccaggtacctctactgaaccttccgaaggcagcgctccaggtacctctaccgaaccgtccgagggcagcgcaccaggtacttctgaaagcgcaacccctgaatccggtccaggtgcatctcctggtaccagctctaccggttctccaggtagctctactccttctggtgctactggctctccaggtgcttccccgggtaccagctctaccggttctccaggtagctctaccccgtctggtgctactggttctccaggtactccgggcagcggtactgcttcttcctctccaggtagctctaccccttctggtgctactggctctcca

SEQ ID NO: 670 - protein, 144 aa, Artificial Sequence
  Description of Artificial Sequence: Synthetic polypeptide
GSPAGSPTSTEEGSPAGSPTSTEEGTSTEPSEGSAPGTSTEPSEGSAPGTSTEPSEGSAPGTSESATPESGPGASPGTSSTGSPGSSTPSGATGSPGASPGTSSTGSPGSSTPSGATGSPGTPGSGTASSSPGSSTPSGATGSP

SEQ ID NO: 671 - DNA, 432 bp, Artificial Sequence
  Description of Artificial Sequence: Synthetic polynucleotide
ggtagctctaccccgtctggtgctactggttctccaggtactccgggcagcggtactgcttcttcctctccaggtagctctaccccttctggtgctactggctctccaggtagcccggctggctctcctacctctactgaggaaggtacttctgaaagcgctactcctgagtctggtccaggtacctctactgaaccgtccgaaggtagcgctccaggtacctctgaaagcgcaactcctgagtctggcccaggtagcgaacctgctacctccggctctgagactccaggtacctctgaaagcgcaaccccggaatctggtccaggtacttctactgaaccgtctgaaggtagcgcaccaggtacttctgaaagcgcaaccccggaatccggcccaggtacctctgaaagcgcaaccccggagtccggccca

SEQ ID NO: 672 - protein, 144 aa, Artificial Sequence
  Description of Artificial Sequence: Synthetic polypeptide
GSSTPSGATGSPGTPGSGTASSSPGSSTPSGATGSPGSPAGSPTSTEEGTSESATPESGPGTSTEPSEGSAPGTSESATPESGPGSEPATSGSETPGTSESATPESGPGTSTEPSEGSAPGTSESATPESGPGTSESATPESGP

SEQ ID NO: 673 - DNA, 57 bp, Artificial Sequence
  Description of Artificial Sequence: Synthetic oligonucleotide
aggtgcaagcgcaagcggcgcgccaagcacgggaggttcgtcttcactcgagggtac

SEQ ID NO: 674 - DNA, 49 bp, Artificial Sequence
  Description of Artificial Sequence: Synthetic oligonucleotide
cctcgagtgaagacgaacctcccgtgcttggcgcgccgcttgcgcttgc

SEQ ID NO: 675 - protein, 11 aa, Artificial Sequence
  Description of Artificial Sequence: Synthetic peptide
GASASGAPSTG

SEQ ID NO: 676 - DNA, 57 bp, Artificial Sequence
  Description of Artificial Sequence: Synthetic oligonucleotide
aggtccagaaccaacggggccggccccaagcggaggttcgtcttcactcgagggtac

SEQ ID NO: 677 - DNA, 49 bp, Artificial Sequence
  Description of Artificial Sequence: Synthetic oligonucleotide
cctcgagtgaagacgaacctccgcttggggccggccccgttggttctgg

SEQ ID NO: 678 - protein, 11 aa, Artificial Sequence
  Description of Artificial Sequence: Synthetic peptide
GPEPTGPAPSG

SEQ ID NO: 679 - DNA, 3237 bp, Artificial Sequence
  Description of Artificial Sequence: Synthetic polynucleotide
atggcaaatacaccggtatcaggcaatttgaaggttgaattctacaacagcaatccttcagatactactaactcaatcaatcctcagttcaaggttactaataccggaagcagtgcaattgatttgtccaaactcacattgagatattattatacagtagacggacagaaagatcagaccttctgggctgaccatgctgcaataatcggcagtaacggcagctacaacggaattacttcaaatgtaaaaggaacatttgtaaaaatgagttcctcaacaaataacgcagacacctaccttgaaatcagctttacaggcggaactcttgaaccgggtgcacatgttcagatacaaggtagatttgcaaagaatgactggagtaactatacacagtcaaatgactactcattcaagtctgcttcacagtttgttgaatgggatcaggtaacagcatacttgaacggtgttcttgtatggggtaaagaacccggtggcagtgtagtaggttcaggttcaggatccgaaaatctgtattttcaacatggtgacggctcttttagcgatgaaatgaatactatactggacaaccttgcggcacgcgacttcattaactggctgatccagacaaaaatcaccgatggaggtagcccggctggctctcctacctctactgaggaaggtacttctgaaagcgctactcctgagtctggtccaggtacctctactgaaccgtccgaaggtagcgctccaggtagcccagcaggctctccgacttccactgaggaaggtacttctactgaaccttccgaaggcagcgcaccaggtacctctactgaaccttctgagggcagcgctccaggtacttctgaaagcgctaccccggaatctggcccaggtagcgaaccggctacttctggttctgaaaccccaggtagcgaaccggctacctccggttctgaaactccaggtagcccggcaggctctccgacctctactgaggaaggtacttctgaaagcgcaaccccggagtccggcccaggtacctctaccgaaccgtctgagggcagcgcaccaggtacttctaccgaaccgtccgagggtagcgcaccaggtagcccagcaggttctcctacctccaccgaggaaggtacttctaccgaaccgtccgagggtagcgcaccaggtacctctactgaaccttctgagggcagcgctccaggtacttctgaaagcgctaccccggagtccggtccaggtacttctactgaaccgtccgaaggtagcgcaccaggtacttctgaaagcgcaacccctgaatccggtccaggtagcgaaccggctacttctggctctgagactccaggtacttctaccgaaccgtccgaaggtagcgcaccaggtacttctactgaaccgtctgaaggtagcgcaccaggtacttctgaaagcgcaaccccggaatccggcccaggtacctctgaaagcgcaaccccggagtccggcccaggtagccctgctggctctccaacctccaccgaagaaggtacctctgaaagcgcaacccctgaatccggcccaggtagcgaaccggcaacctccggttctgaaaccccaggtacctctgaaagcgctactccggagtctggcccaggtacctctactgaaccgtctgagggtagcgctccaggtacttctactgaaccgtccgaaggtagcgcaccaggtacttctaccgaaccgtccgaaggcagcgctccaggtacctctactgaaccttccgagggcagcgctccaggtacctctaccgaaccttctgaaggtagcgcaccaggtacttctaccgaaccgtccgagggtagcgcaccaggtagcccagcaggttctcctacctccaccgaggaaggtacttctaccgaaccgtccgagggtagcgcaccaggtacctctgaaagcgcaactcctgagtctggcccaggtagcgaacctgctacctccggctctgagactccaggtacctctgaaagcgcaaccccggaatctggtccaggtagcgaacctgcaacctctggctctgaaaccccaggtacctctgaaagcgctactcctgaatctggcccaggtacttctactgaaccgtccgagggcagcgcaccaggtacttctgaaagcgctactcctgagtccggcccaggtagcccggctggctctccgacttccaccgaggaaggtagcccggctggctctccaacttctactgaagaaggtagcccggcaggctctccgacctctactgaggaaggtacttctgaaagcgcaaccccggagtccggcccaggtacctctaccgaaccgtctgagggcagcgcaccaggtacctctgaaagcgcaactcctgagtctggcccaggtagcgaacctgctacctccggctctgagactccaggtacctctgaaagcgcaaccccggaatctggtccaggtagcgaacctgcaacctctggctctgaaaccccaggtacctctgaaagcgctactcctgaatctggcccaggtacttctactgaaccgtccgagggcagcgcaccaggtagccctgctggctctccaacctccaccgaagaaggtacctctgaaagcgcaacccctgaatccggcccaggtagcgaaccggcaacctccggttctgaaaccccaggtacttctgaaagcgctactcctgagtccggcccaggtagcccggctggctctccgacttccaccgaggaaggtagcccggctggctctccaacttctactgaagaaggtacttctaccgaaccttccgagggcagcgcaccaggtacttctgaaagcgctacccctgagtccggcccaggtacttctgaaagcgctactcctgaatccggtccaggtacttctgaaagcgctaccccggaatctggcccaggtagcgaaccggctacttctggttctgaaaccccaggtagcgaaccggctacctccggttctgaaactccaggtagcccagcaggctctccgacttccactgaggaaggtacttctactgaaccttccgaaggcagcgcaccaggtacctctactgaaccttctgagggcagcgctccaggtagcgaacctgcaacctctggctctgaaaccccaggtacctctgaaagcgctactcctgaatctggcccaggtacttctactgaaccgtccgagggcagcgcaccaggt

SEQ ID NO: 680 - protein, 1079 aa, Artificial Sequence
  Description of Artificial Sequence: Synthetic polypeptide
MANTPVSGNLKVEFYNSNPSDTTNSINPQFKVTNTGSSAIDLSKLTLRYYYTVDGQKDQTFWADHAAIIGSNGSYNGITSNVKGTFVKMSSSTNNADTYLEISFTGGTLEPGAHVQIQGRFAKNDWSNYTQSNDYSFKSASQFVEWDQVTAYLNGVLVWGKEPGGSVVGSGSGSENLYFQHGDGSFSDEMNTILDNLAARDFINWLIQTKITDGGSPAGSPTSTEEGTSESATPESGPGTSTEPSEGSAPGSPAGSPTSTEEGTSTEPSEGSAPGTSTEPSEGSAPGTSESATPESGPGSEPATSGSETPGSEPATSGSETPGSPAGSPTSTEEGTSESATPESGPGTSTEPSEGSAPGTSTEPSEGSAPGSPAGSPTSTEEGTSTEPSEGSAPGTSTEPSEGSAPGTSESATPESGPGTSTEPSEGSAPGTSESATPESGPGSEPATSGSETPGTSTEPSEGSAPGTSTEPSEGSAPGTSESATPESGPGTSESATPESGPGSPAGSPTSTEEGTSESATPESGPGSEPATSGSETPGTSESATPESGPGTSTEPSEGSAPGTSTEPSEGSAPGTSTEPSEGSAPGTSTEPSEGSAPGTSTEPSEGSAPGTSTEPSEGSAPGSPAGSPTSTEEGTSTEPSEGSAPGTSESATPESGPGSEPATSGSETPGTSESATPESGPGSEPATSGSETPGTSESATPESGPGTSTEPSEGSAPGTSESATPESGPGSPAGSPTSTEEGSPAGSPTSTEEGSPAGSPTSTEEGTSESATPESGPGTSTEPSEGSAPGTSESATPESGPGSEPATSGSETPGTSESATPESGPGSEPATSGSETPGTSESATPESGPGTSTEPSEGSAPGSPAGSPTSTEEGTSESATPESGPGSEPATSGSETPGTSESATPESGPGSPAGSPTSTEEGSPAGSPTSTEEGTSTEPSEGSAPGTSESATPESGPGTSESATPESGPGTSESATPESGPGSEPATSGSETPGSEPATSGSETPGSPAGSPTSTEEGTSTEPSEGSAPGTSTEPSEGSAPGSEPATSGSETPGTSESATPESGPGTSTEPSEGSAPG

SEQ ID NO: 681 - DNA, 2697 bp, Artificial Sequence
  Description of Artificial Sequence: Synthetic polynucleotide
catggtgacggctcttttagcgatgaaatgaatactatactggacaaccttgcggcacgcgacttcattaactggctgatccagacaaaaatcaccgatggaggtagcccggctggctctcctacctctactgaggaaggtacttctgaaagcgctactcctgagtctggtccaggtacctctactgaaccgtccgaaggtagcgctccaggtagcccagcaggctctccgacttccactgaggaaggtacttctactgaaccttccgaaggcagcgcaccaggtacctctactgaaccttctgagggcagcgctccaggtacttctgaaagcgctaccccggaatctggcccaggtagcgaaccggctacttctggttctgaaaccccaggtagcgaaccggctacctccggttctgaaactccaggtagcccggcaggctctccgacctctactgaggaaggtacttctgaaagcgcaaccccggagtccggcccaggtacctctaccgaaccgtctgagggcagcgcaccaggtacttctaccgaaccgtccgagggtagcgcaccaggtagcccagcaggttctcctacctccaccgaggaaggtacttctaccgaaccgtccgagggtagcgcaccaggtacctctactgaaccttctgagggcagcgctccaggtacttctgaaagcgctaccccggagtccggtccaggtacttctactgaaccgtccgaaggtagcgcaccaggtacttctgaaagcgcaacccctgaatccggtccaggtagcgaaccggctacttctggctctgagactccaggtacttctaccgaaccgtccgaaggtagcgcaccaggtacttctactgaaccgtctgaaggtagcgcaccaggtacttctgaaagcgcaaccccggaatccggcccaggtacctctgaaagcgcaaccccggagtccggcccaggtagccctgctggctctccaacctccaccgaagaaggtacctctgaaagcgcaacccctgaatccggcccaggtagcgaaccggcaacctccggttctgaaaccccaggtacctctgaaagcgctactccggagtctggcccaggtacctctactgaaccgtctgagggtagcgctccaggtacttctactgaaccgtccgaaggtagcgcaccaggtacttctaccgaaccgtccgaaggcagcgctccaggtacctctactgaaccttccgagggcagcgctccaggtacctctaccgaaccttctgaaggtagcgcaccaggtacttctaccgaaccgtccgagggtagcgcaccaggtagcccagcaggttctcctacctccaccgaggaaggtacttctaccgaaccgtccgagggtagcgcaccaggtacctctgaaagcgcaactcctgagtctggcccaggtagcgaacctgctacctccggctctgagactccaggtacctctgaaagcgcaaccccggaatctggtccaggtagcgaacctgcaacctctggctctgaaaccccaggtacctctgaaagcgctactcctgaatctggcccaggtacttctactgaaccgtccgagggcagcgcaccaggtacttctgaaagcgctactcctgagtccggcccaggtagcccggctggctctccgacttccaccgaggaaggtagcccggctggctctccaacttctactgaagaaggtagcccggcaggctctccgacctctactgaggaaggtacttctgaaagcgcaaccccggagtccggcccaggtacctctaccgaaccgtctgagggcagcgcaccaggtacctctgaaagcgcaactcctgagtctggcccaggtagcgaacctgctacctccggctctgagactccaggtacctctgaaagcgcaaccccggaatctggtccaggtagcgaacctgcaacctctggctctgaaaccccaggtacctctgaaagcgctactcctgaatctggcccaggtacttctactgaaccgtccgagggcagcgcaccaggtagccctgctggctctccaacctccaccgaagaaggtacctctgaaagcgcaacccctgaatccggcccaggtagcgaaccggcaacctccggttctgaaaccccaggtacttctgaaagcgctactcctgagtccggcccaggtagcccggctggctctccgacttccaccgaggaaggtagcccggctggctctccaacttctactgaagaaggtacttctaccgaaccttccgagggcagcgcaccaggtacttctgaaagcgctacccctgagtccggcccaggtacttctgaaagcgctactcctgaatccggtccaggtacttctgaaagcgctaccccggaatctggcccaggtagcgaaccggctacttctggttctgaaaccccaggtagcgaaccggctacctccggttctgaaactccaggtagcccagcaggctctccgacttccactgaggaaggtacttctactgaaccttccgaaggcagcgcaccaggtacctctactgaaccttctgagggcagcgctccaggtagcgaacctgcaacctctggctctgaaaccccaggtacctctgaaagcgctactcctgaatctggcccaggtacttctactgaaccgtccgagggcagcgcaccaggt

SEQ ID NO: 682 - protein, 899 aa, Artificial Sequence
  Description of Artificial Sequence: Synthetic polypeptide
HGDGSFSDEMNTILDNLAARDFINWLIQTKITDGGSPAGSPTSTEEGTSESATPESGPGTSTEPSEGSAPGSPAGSPTSTEEGTSTEPSEGSAPGTSTEPSEGSAPGTSESATPESGPGSEPATSGSETPGSEPATSGSETPGSPAGSPTSTEEGTSESATPESGPGTSTEPSEGSAPGTSTEPSEGSAPGSPAGSPTSTEEGTSTEPSEGSAPGTSTEPSEGSAPGTSESATPESGPGTSTEPSEGSAPGTSESATPESGPGSEPATSGSETPGTSTEPSEGSAPGTSTEPSEGSAPGTSESATPESGPGTSESATPESGPGSPAGSPTSTEEGTSESATPESGPGSEPATSGSETPGTSESATPESGPGTSTEPSEGSAPGTSTEPSEGSAPGTSTEPSEGSAPGTSTEPSEGSAPGTSTEPSEGSAPGTSTEPSEGSAPGSPAGSPTSTEEGTSTEPSEGSAPGTSESATPESGPGSEPATSGSETPGTSESATPESGPGSEPATSGSETPGTSESATPESGPGTSTEPSEGSAPGTSESATPESGPGSPAGSPTSTEEGSPAGSPTSTEEGSPAGSPTSTEEGTSESATPESGPGTSTEPSEGSAPGTSESATPESGPGSEPATSGSETPGTSESATPESGPGSEPATSGSETPGTSESATPESGPGTSTEPSEGSAPGSPAGSPTSTEEGTSESATPESGPGSEPATSGSETPGTSESATPESGPGSPAGSPTSTEEGSPAGSPTSTEEGTSTEPSEGSAPGTSESATPESGPGTSESATPESGPGTSESATPESGPGSEPATSGSETPGSEPATSGSETPGSPAGSPTSTEEGTSTEPSEGSAPGTSTEPSEGSAPGSEPATSGSETPGTSESATPESGPGTSTEPSEGSAPG

SEQ ID NO: 683 - protein, 6 aa, Tobacco etch virus
ENLYFQ

SEQ ID NO: 684 - protein, 7 aa, Artificial Sequence
  Description of Artificial Sequence: Synthetic peptide
KLTRAET

SEQ ID NO: 685 - protein, 8 aa, Artificial Sequence
  Description of Artificial Sequence: Synthetic peptide
LGPVSGVP

SEQ ID NO: 686 - protein, 8 aa, Artificial Sequence
  Description of Artificial Sequence: Synthetic peptide
GPAGLGGA

SEQ ID NO: 687 - protein, 8 aa, Artificial Sequence
  Description of Artificial Sequence: Synthetic peptide
GPAGLRGA

SEQ ID NO: 688 - protein, 8 aa, Artificial Sequence
  Description of Artificial Sequence: Synthetic peptide
APLGLRLR

SEQ ID NO: 689 - protein, 8 aa, Artificial Sequence
  Description of Artificial Sequence: Synthetic peptide
PALPLVAQ

SEQ ID NO: 690 - protein, 36 aa, Artificial Sequence; identical to SEQ ID NO: 333
  Description of Artificial Sequence: Synthetic polypeptide

SEQ ID NO: 691 - protein, 36 aa, Artificial Sequence; identical to SEQ ID NO: 335
  Description of Artificial Sequence: Synthetic polypeptide

SEQ ID NO: 692 - protein, 36 aa, Artificial Sequence; identical to SEQ ID NO: 519
  Description of Artificial Sequence: Synthetic polypeptide

SEQ ID NO: 693 - protein, 36 aa, Artificial Sequence; identical to SEQ ID NO: 521
  Description of Artificial Sequence: Synthetic polypeptide

SEQ ID NO: 694 - protein, 42 aa, Artificial Sequence; identical to SEQ ID NO: 56
  Description of Artificial Sequence: Synthetic polypeptide

SEQ ID NO: 695 - protein, 42 aa, Artificial Sequence; identical to SEQ ID NO: 56
  Description of Artificial Sequence: Synthetic polypeptide

SEQ ID NO: 696 - protein, 42 aa, Artificial Sequence; identical to SEQ ID NO: 59
  Description of Artificial Sequence: Synthetic polypeptide

SEQ ID NO: 697 - protein, 42 aa, Artificial Sequence; identical to SEQ ID NO: 60
  Description of Artificial Sequence: Synthetic polypeptide

SEQ ID NO: 698 - protein, 144 aa, Artificial Sequence; identical to SEQ ID NO: 65
  Description of Artificial Sequence: Synthetic polypeptide

SEQ ID NO: 699 - protein, 144 aa, Artificial Sequence; identical to SEQ ID NO: 77
  Description of Artificial Sequence: Synthetic polypeptide

SEQ ID NO: 700 - protein, 288 aa, Artificial Sequence; identical to SEQ ID NO: 84
  Description of Artificial Sequence: Synthetic polypeptide

SEQ ID NO: 701 - protein, 288 aa, Artificial Sequence; identical to SEQ ID NO: 87
  Description of Artificial Sequence: Synthetic polypeptide

SEQ ID NO: 702 - protein, 504 aa, Artificial Sequence
  Description of Artificial Sequence: Synthetic polypeptide
GASPGTSSTGSPGSSPSASTGTGPGSSPSASTGTGPGTPGSGTASSSPGSSTPSGATGSPGSNPSASTGTGPGASPGTSSTGSPGTPGSGTASSSPGSSTPSGATGSPGTPGSGTASSSPGASPGTSSTGSPGASPGTSSTGSPGTPGSGTASSSPGSSTPSGATGSPGASPGTSSTGSPGTPGSGTASSSPGSSTPSGATGSPGSNPSASTGTGPGSSPSASTGTGPGSSTPSGATGSPGSSTPSGATGSPGASPGTSSTGSPGASPGTSSTGSPGASPGTSSTGSPGTPGSGTASSSPGASPGTSSTGSPGASPGTSSTGSPGASPGTSSTGSPGSSPSASTGTGPGTPGSGTASSSPGASPGTSSTGSPGASPGTSSTGSPGASPGTSSTGSPGSSTPSGATGSPGSSTPSGATGSPGASPGTSSTGSPGTPGSGTASSSPGSSTPSGATGSPGSSTPSGATGSPGSSTPSGATGSPGSSPSASTGTGPGASPGTSSTGSP

SEQ ID NO: 703 - protein, 576 aa, Artificial Sequence; identical to SEQ ID NO: 90
  Description of Artificial Sequence: Synthetic polypeptide

SEQ ID NO: 704 - protein, 576 aa, Artificial Sequence; identical to SEQ ID NO: 91
  Description of Artificial Sequence: Synthetic polypeptide

SEQ ID NO: 705 - protein, 576 aa, Artificial Sequence; identical to SEQ ID NO: 93
  Description of Artificial Sequence: Synthetic polypeptide

SEQ ID NO: 706 - protein, 540 aa, Artificial Sequence; identical to SEQ ID NO: 89
  Description of Artificial Sequence: Synthetic polypeptide

SEQ ID NO: 707 - protein, 836 aa, Artificial Sequence; identical to SEQ ID NO: 95
  Description of Artificial Sequence: Synthetic polypeptide

SEQ ID NO: 708 - protein, 864 aa, Artificial Sequence; identical to SEQ ID NO: 96
  Description of Artificial Sequence: Synthetic polypeptide

SEQ ID NO: 709 - protein, 875 aa, Artificial Sequence; identical to SEQ ID NO: 97
  Description of Artificial Sequence: Synthetic polypeptide
  MOD_RES (430)..(432): Any amino acid
  MOD_RES (443)..(446): Any amino acid

SEQ ID NO: 710 - protein, 864 aa, Artificial Sequence; identical to SEQ ID NO: 98
  Description of Artificial Sequence: Synthetic polypeptide

SEQ ID NO: 711 - protein, 875 aa, Artificial Sequence; identical to SEQ ID NO: 99
  Description of Artificial Sequence: Synthetic polypeptide

SEQ ID NO: 712 - protein, 1318 aa, Artificial Sequence; identical to SEQ ID NO: 102
  Description of Artificial Sequence: Synthetic polypeptide

SEQ ID NO: 713 - protein, 924 aa, Artificial Sequence; identical to SEQ ID NO: 101
  Description of Artificial Sequence: Synthetic polypeptide

SEQ ID NO: 714 - protein, 913 aa, Artificial Sequence; identical to SEQ ID NO: 100
  Description of Artificial Sequence: Synthetic polypeptide

SEQ ID NO: 715 - protein, 864 aa, Artificial Sequence; identical to SEQ ID NO: 103
  Description of Artificial Sequence: Synthetic polypeptide

SEQ ID NO: 716 - protein, 4 aa, Artificial Sequence
  Description of Artificial Sequence: Synthetic peptide
GGSG

SEQ ID NO: 717 - protein, 288 aa, Artificial Sequence
  Description of Artificial Sequence: Synthetic polypeptide
GSGGEGGSGGEGGSGGEGGSGGEGGSGGEGGSGGEGGSGGEGGSGGEGGSGGEGGSGGEGGSGGEGGSGGEGGSGGEGGSGGEGGSGGEGGSGGEGGSGGEGGSGGEGGSGGEGGSGGEGGSGGEGGSGGEGGSGGEGGSGGEGGSGGEGGSGGEGGSGGEGGSGGEGGSGGEGGSGGEGGSGGEGGSGGEGGSGGEGGSGGEGGSGGEGGSGGEGGSGGEGGSGGEGGSGGEGGSGGEGGSGGEGGSGGEGGSGGEGGSGGEGGSGGEGGSGGEGGSGGEGGSGGEG

SEQ ID NO: 718 - protein, 288 aa, Artificial Sequence
  Description of Artificial Sequence: Synthetic polypeptide
GEGEGGGEGGEGEGGGEGGEGEGGGEGGEGEGGGEGGEGEGGGEGGEGEGGGEGGEGEGGGEGGEGEGGGEGGEGEGGGEGGEGEGGGEGGEGEGGGEGGEGEGGGEGGEGEGGGEGGEGEGGGEGGEGEGGGEGGEGEGGGEGGEGEGGGEGGEGEGGGEGGEGEGGGEGGEGEGGGEGGEGEGGGEGGEGEGGGEGGEGEGGGEGGEGEGGGEGGEGEGGGEGGEGEGGGEGGEGEGGGEGGEGEGGGEGGEGEGGGEGGEGEGGGEGGEGEGGGEGGEGEGGGEG

SEQ ID NO: 719 - protein, 288 aa, Artificial Sequence
  Description of Artificial Sequence: Synthetic polypeptide
SSESSESSSSESSSESSESSSSESSSESSESSSSESSSESSESSSSESSSESSESSSSESSSESSESSSSESSSESSESSSSESSSESSESSSSESSSESSESSSSESSSESSESSSSESSSESSESSSSESSSESSESSSSESSSESSESSSSESSSESSESSSSESSSESSESSSSESSSESSESSSSESSSESSESSSSESSSESSESSSSESSSESSESSSSESSSESSESSSSESSSESSESSSSESSSESSESSSSESSSESSESSSSESSSESSESSSSES

SEQ ID NO: 720 - protein, 288 aa, Artificial Sequence
  Description of Artificial Sequence: Synthetic polypeptide
GEGSGEGSEGEGSEGSGEGEGSEGSGEGEGGSEGSEGEGGSEGSEGEGGSEGSEGEGSGEGSEGEGGSEGSEGEGSGEGSEGEGSEGGSEGEGGSEGSEGEGSGEGSEGEGGEGGSEGEGSEGSGEGEGSGEGSEGEGSEGSGEGEGSGEGSEGEGSEGSGEGEGSEGSGEGEGGSEGSEGEGSEGSGEGEGGEGSGEGEGSGEGSEGEGGGEGSEGEGSGEGGEGEGSEGGSEGEGGSEGGEGEGSEGSGEGEGSEGGSEGEGSEGGSEGEGSEGSGEGEGSEGSGE

SEQ ID NO: 721 - protein, 576 aa, Artificial Sequence
  Description of Artificial Sequence: Synthetic polypeptide
GGKPGEGGKPEGGGGKPGGKPEGEGEGKPGGKPEGGGKPGGGEGGKPEGGKPEGEGKPGGGEGKPGGKPEGGGGKPEGEGKPGGGGGKPGGKPEGEGKPGGGEGGKPEGKPGEGGEGKPGGKPEGGGEGKPGGGKPGEGGKPGEGKPGGGEGGKPEGGKPEGEGKPGGGEGKPGGKPGEGGKPEGGGEGKPGGKPGEGGEGKPGGGKPEGEGKPGGGKPGGGEGGKPEGEGKPGGKPEGGGEGKPGGKPEGGGKPEGGGEGKPGGGKPGEGGKPGEGEGKPGGKPEGEGKPGGEGGGKPEGKPGGGEGGKPEGGKPGEGGKPEGGKPGEGGEGKPGGGKPGEGGKPEGGGKPEGEGKPGGGGKPGEGGKPEGGKPEGGGEGKPGGGKPEGEGKPGGGEGKPGGKPEGGGGKPGEGGKPEGGKPGGEGGGKPEGEGKPGGKPGEGGGGKPGGKPEGEGKPGEGGEGKPGGKPEGGGEGKPGGKPEGGGEGKPGGGKPGEGGKPEGGGKPGEGGKPGEGGKPEGEGKPGGGEGKPGGKPGEGGKPEGGGEGKPGGKPGGEGGGKPEGGKPGEGGKPEG

SEQ ID NO: 722 - protein, 558 aa, Artificial Sequence
  Description of Artificial Sequence: Synthetic polypeptide
GEGKPGGKPGSGGGKPGEGGKPGSGEGKPGGKPGSGGSGKPGGKPGEGGKPEGGSGGKPGGGGKPGGKPGGEGSGKPGGKPEGGGKPEGGSGGKPGGKPEGGSGGKPGGKPGSGEGGKPGGGKPGGEGKPGSGKPGGEGSGKPGGKPEGGSGGKPGGKPEGGSGGKPGGSGKPGGKPGEGGKPEGGSGGKPGGSGKPGGKPEGGGSGKPGGKPGEGGKPGSGEGGKPGGGKPGGEGKPGSGKPGGEGSGKPGGKPGSGGEGKPGGKPEGGSGGKPGGGKPGGEGKPGSGGKPGEGGKPGSGGGKPGGKPGGEGEGKPGGKPGEGGKPGGEGSGKPGGGGKPGGKPGGEGGKPEGSGKPGGGSGKPGGKPEGGGGKPEGSGKPGGGGKPEGSGKPGGGKPEGGSGGKPGGSGKPGGKPGEGGGKPEGSGKPGGGSGKPGGKPEGGGKPEGGSGGKPGGKPEGGSGGKPGGKPGGEGSGKPGGKPGSGEGGKPGGKPGEGSGGKPGGKPEGGSGGKPGGSGKPGGKPEGGGSGKPGGKPGEGGKPGGEGSGKPGGSGKPG

SEQ ID NO: 723 - protein, 577 aa, Artificial Sequence
  Description of Artificial Sequence: Synthetic polypeptide
GGSGKPGKPGGSGSGKPGSGKPGGGSGKPGSGKPGGGSGKPGSGKPGGGSGKPGSGKPGGGGKPGSGSGKPGGGKPGGSGGKPGGGSGKPGKPGSGGSGKPGSGKPGGGSGGKPGKPGSGGSGGKPGKPGSGGGSGKPGKPGSGGSGGKPGKPGSGGSGGKPGKPGSGGSGKPGSGKPGGGSGKPGSGKPGSGGSGKPGKPGSGGSGKPGSGKPGSGSGKPGSGKPGGGSGKPGSGKPGSGGSGKPGKPGSGGGKPGSGSGKPGGGKPGSGSGKPGGGKPGGSGGKPGGSGGKPGKPGSGGGSGKPGKPGSGGGSGKPGKPGGSGSGKPGSGKPGGGSGKPGSGKPGSGGSGKPGKPGSGGSGGKPGKPGSGGGKPGSGSGKPGGGKPGSGSGKPGGGKPGSGSGKPGGGKPGSGSGKPGGSGKPGSGKPGGGSGGKPGKPGSGGSGKPGSGKPGSGGSGKPGKPGGSGSGKPGSGKPGGGSGKPGSGKPGGGSGKPGSGKPGGGSGKPGSGKPGGGGKPGSGSGKPGGSGGKPGKPGSGGSGGKPGKPGSGGSGKPGSGKPGGGSGGKPGKPGSGG

SEQ ID NO: 724 - protein, 576 aa, Artificial Sequence
  Description of Artificial Sequence: Synthetic polypeptide
GEGSGEGSEGEGSEGSGEGEGSEGSGEGEGGSEGSEGEGSEGSGEGEGGEGSGEGEGSGEGSEGEGGGEGSEGEGSGEGGEGEGSEGGSEGEGGSEGGEGEGSEGSGEGEGSEGGSEGEGSEGGSEGEGSEGSGEGEGSEGSGEGEGSEGSGEGEGSEGSGEGEGSEGGSEGEGGSEGSEGEGSGEGSEGEGGSEGSEGEGGGEGSEGEGSGEGSEGEGGSEGSEGEGGSEGSEGEGGEGSGEGEGSEGSGEGEGSGEGSEGEGSEGSGEGEGSEGSGEGEGGSEGSEGEGSGEGSEGEGSEGSGEGEGSEGSGEGEGGSEGSEGEGGSEGSEGEGGSEGSEGEGGEGSGEGEGSEGSGEGEGSGEGSEGEGSEGSGEGEGSEGSGEGEGGSEGSEGEGSEGSGEGEGGEGSGEGEGSGEGSEGEGGGEGSEGEGSEGSGEGEGSEGSGEGEGSEGGSEGEGGSEGSEGEGSEGGSEGEGSEGGSEGEGSEGSGEGEGSEGSGEGEGSGEGSEGEGGSEGGEGEGSEGGSEGEGSEGGSEGEGGEGSGEGEGGGEGSEGEGSEGSGEGEGSGEGSE

SEQ ID NO: 725 - protein, 288 aa, Artificial Sequence; identical to SEQ ID NO: 84
  Description of Artificial Sequence: Synthetic polypeptide

SEQ ID NO: 726 - protein, 288 aa, Artificial Sequence; identical to SEQ ID NO: 86
  Description of Artificial Sequence: Synthetic polypeptide

SEQ ID NO: 727 - protein, 576 aa, Artificial Sequence; identical to SEQ ID NO: 90
  Description of Artificial Sequence: Synthetic polypeptide

SEQ ID NO: 728 - protein, 577 aa, Artificial Sequence
  Description of Artificial Sequence: Synthetic polypeptide
AGSPAGSPTSTEEGTSESATPESGPGTSTEPSEGSAPGSPAGSPTSTEEGTSTEPSEGSAPGTSTEPSEGSAPGTSESATPESGPGSEPATSGSETPGSEPATSGSETPGSPAGSPTSTEEGTSESATPESGPGTSTEPSEGSAPGTSTEPSEGSAPGSPAGSPTSTEEGTSTEPSEGSAPGTSTEPSEGSAPGTSESATPESGPGTSTEPSEGSAPGTSESATPESGPGSEPATSGSETPGTSTEPSEGSAPGTSTEPSEGSAPGTSESATPESGPGTSESATPESGPGSPAGSPTSTEEGTSESATPESGPGSEPATSGSETPGTSESATPESGPGTSTEPSEGSAPGTSTEPSEGSAPGTSTEPSEGSAPGTSTEPSEGSAPGTSTEPSEGSAPGTSTEPSEGSAPGSPAGSPTSTEEGTSTEPSEGSAPGTSESATPESGPGSEPATSGSETPGTSESATPESGPGSEPATSGSETPGTSESATPESGPGTSTEPSEGSAPGTSESATPESGPGSPAGSPTSTEEGSPAGSPTSTEEGSPAGSPTSTEEGTSESATPESGPGTSTEPSEGSAP

SEQ ID NO: 729 - protein, 540 aa, Artificial Sequence; identical to SEQ ID NO: 89
  Description of Artificial Sequence: Synthetic polypeptide

SEQ ID NO: 730 - protein, 504 aa, Artificial Sequence; identical to SEQ ID NO: 702
  Description of Artificial Sequence: Synthetic polypeptide

SEQ ID NO: 731 - protein, 816 aa, Artificial Sequence
  Description of Artificial Sequence: Synthetic polypeptide
GSPAGSPTSTEEGTSESATPESGPGTSTEPSEGSAPGSPAGSPTSTEEGTSTEPSEGSAPGTSTEPSEGSAPGTSESATPESGPGSEPATSGSETPGSEPATSGSETPGSPAGSPTSTEEGTSESATPESGPGTSTEPSEGSAPGTSTEPSEGSAPGSPAGSPTSTEEGTSTEPSEGSAPGTSTEPSEGSAPGTSESATPESGPGTSTEPSEGSAPGTSESATPESGPGSEPATSGSETPGTSTEPSEGSAPGTSTEPSEGSAPGTSESATPESGPGTSESATPESGPGSPAGSPTSTEEGTSESATPESGPGSEPATSGSETPGTSESATPESGPGTSTEPSEGSAPGTSTEPSEGSAPGTSTEPSEGSAPGTSTEPSEGSAPGTSTEPSEGSAPGTSTEPSEGSAPGSPAGSPTSTEEGTSTEPSEGSAPGTSESATPESGPGSEPATSGSETPGTSESATPESGPGSEPATSGSETPGTSESATPESGPGTSTEPSEGSAPGTSESATPESGPGSPAGSPTSTEEGSPAGSPTSTEEGSPAGSPTSTEEGTSESATPESGPGTSTEPSEGSAPGTSESATPESGPGSEPATSGSETPGTSESATPESGPGSEPATSGSETPGTSESATPESGPGTSTEPSEGSAPGSPAGSPTSTEEGTSESATPESGPGSEPATSGSETPGTSESATPESGPGSPAGSPTSTEEGSPAGSPTSTEEGTSTEPSEGSAPGTSESATPESGPGTSESATPESGPGTSESATPESGPGSEPATSGSETPGSEPATSGSETPGSPAGSPTSTEEGTSTEPSEGSAP

SEQ ID NO: 732 - protein, 875 aa, Artificial Sequence; identical to SEQ ID NO: 97
  Description of Artificial Sequence: Synthetic polypeptide
  MOD_RES (430)..(432): Any amino acid
  MOD_RES (443)..(446): Any amino acid

SEQ ID NO: 733 - protein, 864 aa, Artificial Sequence; identical to SEQ ID NO: 98
  Description of Artificial Sequence: Synthetic polypeptide

SEQ ID NO: 734 - protein, 868 aa, Artificial Sequence
  Description of Artificial Sequence: Synthetic polypeptide
GGSPGASPGTSSTGSPGSSPSASTGTGPGSSPSASTGTGPGTPGSGTASSSPGSSTPSGATGSPGSNPSASTGTGPGASPGTSSTGSPGTPGSGTASSSPGSSTPSGATGSPGTPGSGTASSSPGASPGTSSTGSPGASPGTSSTGSPGTPGSGTASSSPGSSTPSGATGSPGASPGTSSTGSPGTPGSGTASSSPGSSTPSGATGSPGSNPSASTGTGPGSSPSASTGTGPGSSTPSGATGSPGSSTPSGATGSPGASPGTSSTGSPGASPGTSSTGSPGASPGTSSTGSPGTPGSGTASSSPGASPGTSSTGSPGASPGTSSTGSPGASPGTSSTGSPGSSPSASTGTGPGTPGSGTASSSPGASPGTSSTGSPGASPGTSSTGSPGASPGTSSTGSPGSSTPSGATGSPGSSTPSGATGSPGASPGTSSTGSPGTPGSGTASSSPGSSTPSGATGSPGSSTPSGATGSPGSSTPSGATGSPGSSPSASTGTGPGASPGTSSTGSPGASPGTSSTGSPGTPGSGTASSSPGASPGTSSTGSPGASPGTSSTGSPGASPGTSSTGSPGASPGTSSTGSPGTPGSGTASSSPGSSTPSGATGSPGTPGSGTASSSPGSSTPSGATGSPGTPGSGTASSSPGSSTPSGATGSPGSSTPSGATGSPGSSPSASTGTGPGSSPSASTGTGPGASPGTSSTGSPGTPGSGTASSSPGSSTPSGATGSPGSSPSASTGTGPGSSPSASTGTGPGASPGTSSTGSPGASPGTSSTGSPGSSTPSGATGSPGSSPSASTGTGPGASPGTSSTGSPGSSPSASTGTGPGTPGSGTASSSPGSSTPSGATGSPGSSTPSGATGSPGASPGTSSTGSP

SEQ ID NO: 735 - protein, 875 aa, Artificial Sequence; identical to SEQ ID NO: 99
  Description of Artificial Sequence: Synthetic polypeptide

SEQ ID NO: 736 - protein, 913 aa, Artificial Sequence; identical to SEQ ID NO: 100
  Description of Artificial Sequence: Synthetic polypeptide

SEQ ID NO: 737 - protein, 924 aa, Artificial Sequence; identical to SEQ ID NO: 101
  Description of Artificial Sequence: Synthetic polypeptide

SEQ ID NO: 738 - protein, 1318 aa, Artificial Sequence; identical to SEQ ID NO: 102
  Description of Artificial Sequence: Synthetic polypeptide

SEQ ID NO: 739 - protein, 9 aa, Artificial Sequence
  Description of Artificial Sequence: Synthetic peptide
FDKLPRTSG

SEQ ID NO: 740 - protein, 178 aa, Artificial Sequence
  Description of Artificial Sequence: Synthetic polypeptide
HADGSFSDEMNTILDNLAARDFINWLIQTKITDGGSEPATSGSETPGTSESATPESGPGSEPATSGSETPGSPAGSPTSTEEGTSTEPSEGSAPGSEPATSGSETPGSEPATSGSETPGSEPATSGSETPGTSTEPSEGSAPGTSESATPESGPGSEPATSGSETPGTSTEPSEGSAP

SEQ ID NO: 741 - protein, 178 aa, Artificial Sequence
  Description of Artificial Sequence: Synthetic polypeptide
HGDGSFSDEMNTILDNLAARDFINWLIQTKITDGGSEPATSGSETPGTSESATPESGPGSEPATSGSETPGSPAGSPTSTEEGTSTEPSEGSAPGSEPATSGSETPGSEPATSGSETPGSEPATSGSETPGTSTEPSEGSAPGTSESATPESGPGSEPATSGSETPGTSTEPSEGSAP

SEQ ID NO: 742 - protein, 322 aa, Artificial Sequence
  Description of Artificial Sequence: Synthetic polypeptide
HADGSFSDEMNTILDNLAARDFINWLIQTKITDGGTSESATPESGPGSEPATSGSETPGTSESATPESGPGSEPATSGSETPGTSESATPESGPGTSTEPSEGSAPGSPAGSPTSTEEGTSESATPESGPGSEPATSGSETPGTSESATPESGPGSPAGSPTSTEEGSPAGSPTSTEEGTSTEPSEGSAPGTSESATPESGPGTSESATPESGPGTSESATPESGPGSEPATSGSETPGSEPATSGSETPGSPAGSPTSTEEGTSTEPSEGSAPGTSTEPSEGSAPGSEPATSGSETPGTSESATPESGPGTSTEPSEGSAP

SEQ ID NO: 743 - protein, 322 aa, Artificial Sequence
  Description of Artificial Sequence: Synthetic polypeptide
HGDGSFSDEMNTILDNLAARDFINWLIQTKITDGGTSESATPESGPGSEPATSGSETPGTSESATPESGPGSEPATSGSETPGTSESATPESGPGTSTEPSEGSAPGSPAGSPTSTEEGTSESATPESGPGSEPATSGSETPGTSESATPESGPGSPAGSPTSTEEGSPAGSPTSTEEGTSTEPSEGSAPGTSESATPESGPGTSESATPESGPGTSESATPESGPGSEPATSGSETPGSEPATSGSETPGSPAGSPTSTEEGTSTEPSEGSAPGTSTEPSEGSAPGSEPATSGSETPGTSESATPESGPGTSTEPSEGSAP

SEQ ID NO: 744 - protein, 178 aa, Artificial Sequence
  Description of Artificial Sequence: Synthetic polypeptide
HADGSFSDEMNTILDNLAARDFINWLIQTKITDGGTSTPESGSASPGTSPSGESSTAPGTSPSGESSTAPGSTSSTAESPGPGSTSESPSGTAPGSTSSTAESPGPGTSPSGESSTAPGTSTPESGSASPGSTSSTAESPGPGTSPSGESSTAPGTSPSGESSTAPGTSPSGESSTAP

SEQ ID NO: 745 - protein, 178 aa, Artificial Sequence
  Description of Artificial Sequence: Synthetic polypeptide
HGDGSFSDEMNTILDNLAARDFINWLIQTKITDGGTSTPESGSASPGTSPSGESSTAPGTSPSGESSTAPGSTSSTAESPGPGSTSESPSGTAPGSTSSTAESPGPGTSPSGESSTAPGTSTPESGSASPGSTSSTAESPGPGTSPSGESSTAPGTSPSGESSTAPGTSPSGESSTAP

SEQ ID NO: 746 - protein, 610 aa, Artificial Sequence
  Description of Artificial Sequence: Synthetic polypeptide
HADGSFSDEMNTILDNLAARDFINWLIQTKITDGGSSESGSSEGGPGSGGEPSESGSSGSSESGSSEGGPGSSESGSSEGGPGSSESGSSEGGPGSSESGSSEGGPGSSESGSSEGGPGESPGGSSGSESGSEGSSGPGESSGSSESGSSEGGPGSSESGSSEGGPGSSESGSSEGGPGSGGEPSESGSSGESPGGSSGSESGESPGGSSGSESGSGGEPSESGSSGSSESGSSEGGPGSGGEPSESGSSGSGGEPSESGSSGSEGSSGPGESSGESPGGSSGSESGSGGEPSESGSSGSGGEPSESGSSGSGGEPSESGSSGSSESGSSEGGPGESPGGSSGSESGESPGGSSGSESGESPGGSSGSESGESPGGSSGSESGESPGGSSGSESGSSESGSSEGGPGSGGEPSESGSSGSEGSSGPGESSGSSESGSSEGGPGSGGEPSESGSSGSSESGSSEGGPGSGGEPSESGSSGESPGGSSGSESGESPGGSSGSESGSSESGSSEGGPGSGGEPSESGSSGSSESGSSEGGPGSGGEPSESGSSGSGGEPSESGSSGESPGGSSGSESGSEGSSGPGESSGSSESGSSEGGPGSEGSSGPGESS

SEQ ID NO: 747 - protein, 610 aa, Artificial Sequence
  Description of Artificial Sequence: Synthetic polypeptide
HGDGSFSDEMNTILDNLAARDFINWLIQTKITDGGSSESGSSEGGPGSGGEPSESGSSGSSESGSSEGGPGSSESGSSEGGPGSSESGSSEGGPGSSESGSSEGGPGSSESGSSEGGPGESPGGSSGSESGSEGSSGPGESSGSSESGSSEGGPGSSESGSSEGGPGSSESGSSEGGPGSGGEPSESGSSGESPGGSSGSESGESPGGSSGSESGSGGEPSESGSSGSSESGSSEGGPGSGGEPSESGSSGSGGEPSESGSSGSEGSSGPGESSGESPGGSSGSESGSGGEPSESGSSGSGGEPSESGSSGSGGEPSESGSSGSSESGSSEGGPGESPGGSSGSESGESPGGSSGSESGESPGGSSGSESGESPGGSSGSESGESPGGSSGSESGSSESGSSEGGPGSGGEPSESGSSGSEGSSGPGESSGSSESGSSEGGPGSGGEPSESGSSGSSESGSSEGGPGSGGEPSESGSSGESPGGSSGSESGESPGGSSGSESGSSESGSSEGGPGSGGEPSESGSSGSSESGSSEGGPGSGGEPSESGSSGSGGEPSESGSSGESPGGSSGSESGSEGSSGPGESSGSSESGSSEGGPGSEGSSGPGESS

SEQ ID NO: 748 - protein, 610 aa, Artificial Sequence
  Description of Artificial Sequence: Synthetic polypeptide
HADGSFSDEMNTILDNLAARDFINWLIQTKITDGGSPAGSPTSTEEGTSESATPESGPGTSTEPSEGSAPGSPAGSPTSTEEGTSTEPSEGSAPGTSTEPSEGSAPGTSESATPESGPGSEPATSGSETPGSEPATSGSETPGSPAGSPTSTEEGTSESATPESGPGTSTEPSEGSAPGTSTEPSEGSAPGSPAGSPTSTEEGTSTEPSEGSAPGTSTEPSEGSAPGTSESATPESGPGTSTEPSEGSAPGTSESATPESGPGSEPATSGSETPGTSTEPSEGSAPGTSTEPSEGSAPGTSESATPESGPGTSESATPESGPGSPAGSPTSTEEGTSESATPESGPGSEPATSGSETPGTSESATPESGPGTSTEPSEGSAPGTSTEPSEGSAPGTSTEPSEGSAPGTSTEPSEGSAPGTSTEPSEGSAPGTSTEPSEGSAPGSPAGSPTSTEEGTSTEPSEGSAPGTSESATPESGPGSEPATSGSETPGTSESATPESGPGSEPATSGSETPGTSESATPESGPGTSTEPSEGSAPGTSESATPESGPGSPAGSPTSTEEGSPAGSPTSTEEGSPAGSPTSTEEGTSESATPESGPGTSTEPSEGSAP

SEQ ID NO: 749 - protein, 610 aa, Artificial Sequence
  Description of Artificial Sequence: Synthetic polypeptide
HGDGSFSDEMNTILDNLAARDFINWLIQTKITDGGSPAGSPTSTEEGTSESATPESGPGTSTEPSEGSAPGSPAGSPTSTEEGTSTEPSEGSAPGTSTEPSEGSAPGTSESATPESGPGSEPATSGSETPGSEPATSGSETPGSPAGSPTSTEEGTSESATPESGPGTSTEPSEGSAPGTSTEPSEGSAPGSPAGSPTSTEEGTSTEPSEGSAPGTSTEPSEGSAPGTSESATPESGPGTSTEPSEGSAPGTSESATPESGPGSEPATSGSETPGTSTEPSEGSAPGTSTEPSEGSAPGTSESATPESGPGTSESATPESGPGSPAGSPTSTEEGTSESATPESGPGSEPATSGSETPGTSESATPESGPGTSTEPSEGSAPGTSTEPSEGSAPGTSTEPSEGSAPGTSTEPSEGSAPGTSTEPSEGSAPGTSTEPSEGSAPGSPAGSPTSTEEGTSTEPSEGSAPGTSESATPESGPGSEPATSGSETPGTSESATPESGPGSEPATSGSETPGTSESATPESGPGTSTEPSEGSAPGTSESATPESGPGSPAGSPTSTEEGSPAGSPTSTEEGSPAGSPTSTEEGTSESATPESGPGTSTEPSEGSAP

SEQ ID NO: 750 - protein, 610 aa, Artificial Sequence
  Description of Artificial Sequence: Synthetic polypeptide
HADGSFSDEMNTILDNLAARDFINWLIQTKITDGGSTSSTAESPGPGSTSSTAESPGPGSTSESPSGTAPGSTSSTAESPGPGSTSSTAESPGPGTSTPESGSASPGSTSESPSGTAPGTSPSGESSTAPGSTSESPSGTAPGSTSESPSGTAPGTSPSGESSTAPGSTSESPSGTAPGSTSESPSGTAPGTSPSGESSTAPGSTSESPSGTAPGSTSESPSGTAPGSTSESPSGTAPGTSTPESGSASPGSTSESPSGTAPGTSTPESGSASPGSTSSTAESPGPGSTSSTAESPGPGTSTPESGSASPGTSTPESGSASPGSTSESPSGTAPGTSTPESGSASPGTSTPESGSASPGSTSESPSGTAPGSTSESPSGTAPGSTSESPSGTAPGSTSSTAESPGPGTSTPESGSASPGTSTPESGSASPGSTSESPSGTAPGSTSESPSGTAPGTSTPESGSASPGSTSESPSGTAPGSTSESPSGTAPGTSTPESGSASPGTSPSGESSTAPGSTSSTAESPGPGTSPSGESSTAPGSTSSTAESPGPGTSTPESGSASPGSTSESPSGTAPGSTSSTAESPGPGTSTPESGSASPGTSTPESGSASP

SEQ ID NO: 751 - protein, 610 aa, Artificial Sequence
  Description of Artificial Sequence: Synthetic polypeptide
HGDGSFSDEMNTILDNLAARDFINWLIQTKITDGGSTSSTAESPGPGSTSSTAESPGPGSTSESPSGTAPGSTSSTAESPGPGSTSSTAESPGPGTSTPESGSASPGSTSESPSGTAPGTSPSGESSTAPGSTSESPSGTAPGSTSESPSGTAPGTSPSGESSTAPGSTSESPSGTAPGSTSESPSGTAPGTSPSGESSTAPGSTSESPSGTAPGSTSESPSGTAPGSTSESPSGTAPGTSTPESGSASPGSTSESPSGTAPGTSTPESGSASPGSTSSTAESPGPGSTSSTAESPGPGTSTPESGSASPGTSTPESGSASPGSTSESPSGTAPGTSTPESGSASPGTSTPESGSASPGSTSESPSGTAPGSTSESPSGTAPGSTSESPSGTAPGSTSSTAESPGPGTSTPESGSASPGTSTPESGSASPGSTSESPSGTAPGSTSESPSGTAPGTSTPESGSASPGSTSESPSGTAPGSTSESPSGTAPGTSTPESGSASPGTSPSGESSTAPGSTSSTAESPGPGTSPSGESSTAPGSTSSTAESPGPGTSTPESGSASPGSTSESPSGTAPGSTSSTAESPGPGTSTPESGSASPGTSTPESGSASP

SEQ ID NO: 752 - protein, 659 aa, Artificial Sequence
  Description of Artificial Sequence: Synthetic polypeptide
HGDGSFSDEMNTILDNLAARDFINWLIQTKITDGMAEPAGSPTSTEEGTPGSGTASSSPGSSTPSGATGSPGASPGTSSTGSPGSPAGSPTSTEEGTSESATPESGPGTSTEPSEGSAPGSPAGSPTSTEEGTSTEPSEGSAPGTSTEPSEGSAPGTSESATPESGPGSEPATSGSETPGSEPATSGSETPGSPAGSPTSTEEGTSESATPESGPGTSTEPSEGSAPGTSTEPSEGSAPGSPAGSPTSTEEGTSTEPSEGSAPGTSTEPSEGSAPGTSESATPESGPGTSTEPSEGSAPGTSESATPESGPGSEPATSGSETPGTSTEPSEGSAPGTSTEPSEGSAPGTSESATPESGPGTSESATPESGPGSPAGSPTSTEEGTSESATPESGPGSEPATSGSETPGTSESATPESGPGTSTEPSEGSAPGTSTEPSEGSAPGTSTEPSEGSAPGTSTEPSEGSAPGTSTEPSEGSAPGTSTEPSEGSAPGSPAGSPTSTEEGTSTEPSEGSAPGTSESATPESGPGSEPATSGSETPGTSESATPESGPGSEPATSGSETPGTSESATPESGPGTSTEPSEGSAPGTSESATPESGPGSPAGSPTSTEEGSPAGSPTSTEEGSPAGSPTSTEEGTSESATPESGPGTSTEPSEGSAP

SEQ ID NO: 753 - protein, 870 aa, Artificial Sequence
  Description of Artificial Sequence: Synthetic polypeptide
HADGSFSDEMNTILDNLAARDFINWLIQTKITDGGSSESGSSEGGPGSSESGSSEGGPGESPGGSSGSESGSGGEPSESGSSGESPGGSSGSESGESPGGSSGSESGSSESGSSEGGPGSSESGSSEGGPGSSESGSSEGGPGESPGGSSGSESGESPGGSSGSESGESPGGSSGSESGSSESGSSEGGPGSSESGSSEGGPGSSESGSSEGGPGSSESGSSEGGPGSSESGSSEGGPGSSESGSSEGGPGSGGEPSESGSSGESPGGSSGSESGESPGGSSGSESGSGGEPSESGSSGSEGSSGPGESSGSSESGSSEGGPGSGGEPSESGSSGSEGSSGPGESSGSSESGSSEGGPGSGGEPSESGSSGESPGGSSGSESGSGGEPSESGSSGSGGEPSESGSSGSSESGSSEGGPGSGGEPSESGSSGSGGEPSESGSSGSEGSSGPGESSGESPGGSSGSESGSEGSSGPGESSGSEGSSGPGESSGSGGEPSESGSSGSSESGSSEGGPGSSESGSSEGGPGESPGGSSGSESGSGGEPSESGSSGSEGSSGPGESSGESPGGSSGSESGSEGSSGPGSSESGSSEGGPGSGGEPSESGSSGSEGSSGPGESSGSEGSSGPGESSGSEGSSGPGESSGSGGEPSESGSSGSGGEPSESGSSGESPGGSSGSESGESPGGSSGSESGSGGEPSESGSSGSEGSSGPGESSGESPGGSSGSESGSSESGSSEGGPGSSESGSSEGGPGSSESGSSEGGPGSGGEPSESGSSGSSESGSSEGGPGESPGGSSGSESGSGGEPSESGSSGSSESGSSEGGPGESPGGSSGSESGSGGEPSESGSSGESPGGSSGSESGSGGEPSESGSS

SEQ ID NO: 754 - protein, 870 aa, Artificial Sequence
  Description of Artificial Sequence: Synthetic polypeptide
HGDGSFSDEMNTILDNLAARDFINWLIQTKITDGGSSESGSSEGGPGSSESGSSEGGPGESPGGSSGSESGSGGEPSESGSSGESPGGSSGSESGESPGGSSGSESGSSESGSSEGGPGSSESGSSEGGPGSSESGSSEGGPGESPGGSSGSESGESPGGSSGSESGESPGGSSGSESGSSESGSSEGGPGSSESGSSEGGPGSSESGSSEGGPGSSESGSSEGGPGSSESGSSEGGPGSSESGSSEGGPGSGGEPSESGSSGESPGGSSGSESGESPGGSSGSESGSGGEPSESGSSGSEGSSGPGESSGSSESGSSEGGPGSGGEPSESGSSGSEGSSGPGESSGSSESGSSEGGPGSGGEPSESGSSGESPGGSSGSESGSGGEPSESGSSGSGGEPSESGSSGSSESGSSEGGPGSGGEPSESGSSGSGGEPSESGSSGSEGSSGPGESSGESPGGSSGSESGSEGSSGPGESSGSEGSSGPGESSGSGGEPSESGSSGSSESGSSEGGPGSSESGSSEGGPGESPGGSSGSESGSGGEPSESGSSGSEGSSGPGESSGESPGGSSGSESGSEGSSGPGSSESGSSEGGPGSGGEPSESGSSGSEGSSGPGESSGSEGSSGPGESSGSEGSSGPGESSGSGGEPSESGSSGSGGEPSESGSSGESPGGSSGSESGESPGGSSGSESGSGGEPSESGSSGSEGSSGPGESSGESPGGSSGSESGSSESGSSEGGPGSSESGSSEGGPGSSESGSSEGGPGSGGEPSESGSSGSSESGSSEGGPGESPGGSSGSESGSGGEPSESGSSGSSESGSSEGGPGESPGGSSGSESGSGGEPSESGSSGESPGGSSGSESGSGGEPSESGSS

SEQ ID NO: 755 - protein, 899 aa, Artificial Sequence
  Description of Artificial Sequence: Synthetic polypeptide
HADGSFSDEMNTILDNLAARDFINWLIQTKITDGGSPAGSPTSTEEGTSESATPESGPGTSTEPSEGSAPGSPAGSPTSTEEGTSTEPSEGSAPGTSTEPSEGSAPGTSESATPESGPGSEPATSGSETPGSEPATSGSETPGSPAGSPTSTEEGTSESATPESGPGTSTEPSEGSAPGTSTEPSEGSAPGSPAGSPTSTEEGTSTEPSEGSAPGTSTEPSEGSAPGTSESATPESGPGTSTEPSEGSAPGTSESATPESGPGSEPATSGSETPGTSTEPSEGSAPGTSTEPSEGSAPGTSESATPESGPGTSESATPESGPGSPAGSPTSTEEGTSESATPESGPGSEPATSGSETPGTSESATPESGPGTSTEPSEGSAPGTSTEPSEGSAPGTSTEPSEGSAPGTSTEPSEGSAPGTSTEPSEGSAPGTSTEPSEGSAPGSPAGSPTSTEEGTSTEPSEGSAPGTSESATPESGPGSEPATSGSETPGTSESATPESGPGSEPATSGSETPGTSESATPESGPGTSTEPSEGSAPGTSESATPESGPGSPAGSPTSTEEGSPAGSPTSTEEGSPAGSPTSTEEGTSESATPESGPGTSTEPSEGSAPGTSESATPESGPGSEPATSGSETPGTSESATPESGPGSEPATSGSETPGTSESATPESGPGTSTEPSEGSAPGSPAGSPTSTEEGTSESATPESGPGSEPATSGSETPGTSESATPESGPGSPAGSPTSTEEGSPAGSPTSTEEGTSTEPSEGSAPGTSESATPESGPGTSESATPESGPGTSESATPESGPGSEPATSGSETPGSEPATSGSETPGSPAGSPTSTEEGTSTEPSEGSAPGTSTEPSEGSAPGSEPATSGSETPGTSESATPESGPGTSTEPSEGSAPG

SEQ ID NO: 756 - protein, 899 aa, Artificial Sequence; identical to SEQ ID NO: 682
  Description of Artificial Sequence: Synthetic polypeptide

SEQ ID NO: 757 - protein, 899 aa, Artificial Sequence
  Description of Artificial Sequence: Synthetic polypeptide
HADGSFSDEMNTILDNLATRDFINWLIQTKITDGGSPAGSPTSTEEGTSESATPESGPGTSTEPSEGSAPGSPAGSPTSTEEGTSTEPSEGSAPGTSTEPSEGSAPGTSESATPESGPGSEPATSGSETPGSEPATSGSETPGSPAGSPTSTEEGTSESATPESGPGTSTEPSEGSAPGTSTEPSEGSAPGSPAGSPTSTEEGTSTEPSEGSAPGTSTEPSEGSAPGTSESATPESGPGTSTEPSEGSAPGTSESATPESGPGSEPATSGSETPGTSTEPSEGSAPGTSTEPSEGSAPGTSESATPESGPGTSESATPESGPGSPAGSPTSTEEGTSESATPESGPGSEPATSGSETPGTSESATPESGPGTSTEPSEGSAPGTSTEPSEGSAPGTSTEPSEGSAPGTSTEPSEGSAPGTSTEPSEGSAPGTSTEPSEGSAPGSPAGSPTSTEEGTSTEPSEGSAPGTSESATPESGPGSEPATSGSETPGTSESATPESGPGSEPATSGSETPGTSESATPESGPGTSTEPSEGSAPGTSESATPESGPGSPAGSPTSTEEGSPAGSPTSTEEGSPAGSPTSTEEGTSESATPESGPGTSTEPSEGSAPGTSESATPESGPGSEPATSGSETPGTSESATPESGPGSEPATSGSETPGTSESATPESGPGTSTEPSEGSAPGSPAGSPTSTEEGTSESATPESGPGSEPATSGSETPGTSESATPESGPGSPAGSPTSTEEGSPAGSPTSTEEGTSTEPSEGSAPGTSESATPESGPGTSESATPESGPGTSESATPESGPGSEPATSGSETPGSEPATSGSETPGSPAGSPTSTEEGTSTEPSEGSAPGTSTEPSEGSAPGSEPATSGSETPGTSESATPESGPGTSTEPSEGSAPG

SEQ ID NO: 758 - protein, 899 aa, Artificial Sequence
  Description of Artificial Sequence: Synthetic polypeptide
HVDGSFSDEMNTILDNLAARDFINWLIQTKITDGGSPAGSPTSTEEGTSESATPESGPGTSTEPSEGSAPGSPAGSPTSTEEGTSTEPSEGSAPGTSTEPSEGSAPGTSESATPESGPGSEPATSGSETPGSEPATSGSETPGSPAGSPTSTEEGTSESATPESGPGTSTEPSEGSAPGTSTEPSEGSAPGSPAGSPTSTEEGTSTEPSEGSAPGTSTEPSEGSAPGTSESATPESGPGTSTEPSEGSAPGTSESATPESGPGSEPATSGSETPGTSTEPSEGSAPGTSTEPSEGSAPGTSESATPESGPGTSESATPESGPGSPAGSPTSTEEGTSESATPESGPGSEPATSGSETPGTSESATPESGPGTSTEPSEGSAPGTSTEPSEGSAPGTSTEPSEGSAPGTSTEPSEGSAPGTSTEPSEGSAPGTSTEPSEGSAPGSPAGSPTSTEEGTSTEPSEGSAPGTSESATPESGPGSEPATSGSETPGTSESATPESGPGSEPATSGSETPGTSESATPESGPGTSTEPSEGSAPGTSESATPESGPGSPAGSPTSTEEGSPAGSPTSTEEGSPAGSPTSTEEGTSESATPESGPGTSTEPSEGSAPGTSESATPESGPGSEPATSGSETPGTSESATPESGPGSEPATSGSETPGTSESATPESGPGTSTEPSEGSAPGSPAGSPTSTEEGTSESATPESGPGSEPATSGSETPGTSESATPESGPGSPAGSPTSTEEGSPAGSPTSTEEGTSTEPSEGSAPGTSESATPESGPGTSESATPESGPGTSESATPESGPGSEPATSGSETPGSEPATSGSETPGSPAGSPTSTEEGTSTEPSEGSAPGTSTEPSEGSAPGSEPATSGSETPGTSESATPESGPGTSTEPSEGSAPG

SEQ ID NO: 759 - protein, 909 aa, Artificial Sequence
  Description of Artificial Sequence: Synthetic polypeptide
  MOD_RES (464)..(466): Any amino acid
  MOD_RES (477)..(480): Any amino acid
HADGSFSDEMNTILDNLAARDFINWLIQTKITDGGSTSESPSGTAPGTSPSGESSTAPGSTSESPSGTAPGSTSESPSGTAPGTSTPESGSASPGTSTPESGSASPGSTSESPSGTAPGSTSESPSGTAPGTSPSGESSTAPGSTSESPSGTAPGTSPSGESSTAPGTSPSGESSTAPGSTSSTAESPGPGTSPSGESSTAPGTSPSGESSTAPGSTSSTAESPGPGTSTPESGSASPGTSTPESGSASPGSTSESPSGTAPGSTSESPSGTAPGTSTPESGSASPGSTSSTAESPGPGTSTPESGSASPGSTSESPSGTAPGTSPSGESSTAPGSTSSTAESPGPGTSPSGESSTAPGTSTPESGSASPGSTSSTAESPGPGSTSSTAESPGPGSTSSTAESPGPGSTSSTAESPGPGTSPSGESSTAPGSTSESPSGTAPGSTSESPSGTAPGTSTPESGPXXXGASASGAPSTXXXXSESPSGTAPGSTSESPSGTAPGSTSESPSGTAPGSTSESPSGTAPGSTSESPSGTAPGSTSESPSGTAPGTSTPESGSASPGTSPSGESSTAPGTSPSGESSTAPGSTSSTAESPGPGTSPSGESSTAPGTSTPESGSASPGSTSESPSGTAPGSTSESPSGTAPGTSPSGESSTAPGSTSESPSGTAPGTSTPESGSASPGTSTPESGSASPGSTSESPSGTAPGTSTPESGSASPGSTSSTAESPGPGSTSESPSGTAPGSTSESPSGTAPGTSPSGESSTAPGSTSSTAESPGPGTSPSGESSTAPGTSTPESGSASPGTSPSGESSTAPGTSPSGESSTAPGTSPSGESSTAPGSTSSTAESPGPGSTSSTAESPGPGTSPSGESSTAPGSSPSASTGTGPGSSTPSGATGSPGSSTPSGATGSP

SEQ ID NO: 760 - protein, 909 aa, Artificial Sequence
  Description of Artificial Sequence: Synthetic polypeptide
  MOD_RES (464)..(466): Any amino acid
  MOD_RES (477)..(480): Any amino acid
HGDGSFSDEMNTILDNLAARDFINWLIQTKITDGGSTSESPSGTAPGTSPSGESSTAPGSTSESPSGTAPGSTSESPSGTAPGTSTPESGSASPGTSTPESGSASPGSTSESPSGTAPGSTSESPSGTAPGTSPSGESSTAPGSTSESPSGTAPGTSPSGESSTAPGTSPSGESSTAPGSTSSTAESPGPGTSPSGESSTAPGTSPSGESSTAPGSTSSTAESPGPGTSTPESGSASPGTSTPESGSASPGSTSESPSGTAPGSTSESPSGTAPGTSTPESGSASPGSTSSTAESPGPGTSTPESGSASPGSTSESPSGTAPGTSPSGESSTAPGSTSSTAESPGPGTSPSGESSTAPGTSTPESGSASPGSTSSTAESPGPGSTSSTAESPGPGSTSSTAESPGPGSTSSTAESPGPGTSPSGESSTAPGSTSESPSGTAPGSTSESPSGTAPGTSTPESGPXXXGASASGAPSTXXXXSESPSGTAPGSTSESPSGTAPGSTSESPSGTAPGSTSESPSGTAPGSTSESPSGTAPGSTSESPSGTAPGTSTPESGSASPGTSPSGESSTAPGTSPSGESSTAPGSTSSTAESPGPGTSPSGESSTAPGTSTPESGSASPGSTSESPSGTAPGSTSESPSGTAPGTSPSGESSTAPGSTSESPSGTAPGTSTPESGSASPGTSTPESGSASPGSTSESPSGTAPGTSTPESGSASPGSTSSTAESPGPGSTSESPSGTAPGSTSESPSGTAPGTSPSGESSTAPGSTSSTAESPGPGTSPSGESSTAPGTSTPESGSASPGTSPSGESSTAPGTSPSGESSTAPGTSPSGESSTAPGSTSSTAESPGPGSTSSTAESPGPGTSPSGESSTAPGSSPSASTGTGPGSSTPSGATGSPGSSTPSGATGSP

SEQ ID NO: 761 - protein, 898 aa, Artificial Sequence
  Description of Artificial Sequence: Synthetic polypeptide
HADGSFSDEMNTILDNLAARDFINWLIQTKITDGGASPGTSSTGSPGSSPSASTGTGPGSSPSASTGTGPGTPGSGTASSSPGSSTPSGATGSPGSNPSASTGTGPGASPGTSSTGSPGTPGSGTASSSPGSSTPSGATGSPGTPGSGTASSSPGASPGTSSTGSPGASPGTSSTGSPGTPGSGTASSSPGSSTPSGATGSPGASPGTSSTGSPGTPGSGTASSSPGSSTPSGATGSPGSNPSASTGTGPGSSPSASTGTGPGSSTPSGATGSPGSSTPSGATGSPGASPGTSSTGSPGASPGTSSTGSPGASPGTSSTGSPGTPGSGTASSSPGASPGTSSTGSPGASPGTSSTGSPGASPGTSSTGSPGSSPSASTGTGPGTPGSGTASSSPGASPGTSSTGSPGASPGTSSTGSPGASPGTSSTGSPGSSTPSGATGSPGSSTPSGATGSPGASPGTSSTGSPGTPGSGTASSSPGSSTPSGATGSPGSSTPSGATGSPGSSTPSGATGSPGSSPSASTGTGPGASPGTSSTGSPGASPGTSSTGSPGTPGSGTASSSPGASPGTSSTGSPGASPGTSSTGSPGASPGTSSTGSPGASPGTSSTGSPGTPGSGTASSSPGSSTPSGATGSPGTPGSGTASSSPGSSTPSGATGSPGTPGSGTASSSPGSSTPSGATGSPGSSTPSGATGSPGSSPSASTGTGPGSSPSASTGTGPGASPGTSSTGSPGTPGSGTASSSPGSSTPSGATGSPGSSPSASTGTGPGSSPSASTGTGPGASPGTSSTGSPGASPGTSSTGSPGSSTPSGATGSPGSSPSASTGTGPGASPGTSSTGSPGSSPSASTGTGPGTPGSGTASSSPGSSTPSGATGSPGSSTPSGATGSPGASPGTSSTGSP

SEQ ID NO: 762 - protein, 898 aa, Artificial Sequence
  Description of Artificial Sequence: Synthetic polypeptide
HGDGSFSDEMNTILDNLAARDFINWLIQTKITDGGASPGTSSTGSPGSSPSASTGTGPGSSPSASTGTGPGTPGSGTASSSPGSSTPSGATGSPGSNPSASTGTGPGASPGTSSTGSPGTPGSGTASSSPGSSTPSGATGSPGTPGSGTASSSPGASPGTSSTGSPGASPGTSSTGSPGTPGSGTASSSPGSSTPSGATGSPGASPGTSSTGSPGTPGSGTASSSPGSSTPSGATGSPGSNPSASTGTGPGSSPSASTGTGPGSSTPSGATGSPGSSTPSGATGSPGASPGTSSTGSPGASPGTSSTGSPGASPGTSSTGSPGTPGSGTASSSPGASPGTSSTGSPGASPGTSSTGSPGASPGTSSTGSPGSSPSASTGTGPGTPGSGTASSSPGASPGTSSTGSPGASPGTSSTGSPGASPGTSSTGSPGSSTPSGATGSPGSSTPSGATGSPGASPGTSSTGSPGTPGSGTASSSPGSSTPSGATGSPGSSTPSGATGSPGSSTPSGATGSPGSSPSASTGTGPGASPGTSSTGSPGASPGTSSTGSPGTPGSGTASSSPGASPGTSSTGSPGASPGTSSTGSPGASPGTSSTGSPGASPGTSSTGSPGTPGSGTASSSPGSSTPSGATGSPGTPGSGTASSSPGSSTPSGATGSPGTPGSGTASSSPGSSTPSGATGSPGSSTPSGATGSPGSSPSASTGTGPGSSPSASTGTGPGASPGTSSTGSPGTPGSGTASSSPGSSTPSGATGSPGSSPSASTGTGPGSSPSASTGTGPGASPGTSSTGSPGASPGTSSTGSPGSSTPSGATGSPGSSPSASTGTGPGASPGTSSTGSPGSSPSASTGTGPGTPGSGTASSSPGSSTPSGATGSPGSSTPSGATGSPGASPGTSSTGSP

SEQ ID NO: 763 - protein, 909 aa, Artificial Sequence
  Description of Artificial Sequence: Synthetic polypeptide
HGDGSFSDEMNTILDNLAARDFINWLIQTKITDGGTSTEPSEGSAPGSEPATSGSETPGSPAGSPTSTEEGSTSSTAESPGPGTSTPESGSASPGSTSESPSGTAPGSTSESPSGTAPGTSTPESGSASPGTSTPESGSASPGSEPATSGSETPGTSESATPESGPGSPAGSPTSTEEGTSTEPSEGSAPGTSESATPESGPGTSTEPSEGSAPGTSTEPSEGSAPGSPAGSPTSTEEGTSTEPSEGSAPGTSTEPSEGSAPGTSESATPESGPGTSESATPESGPGTSTEPSEGSAPGTSTEPSEGSAPGTSESATPESGPGTSTEPSEGSAPGSEPATSGSETPGSPAGSPTSTEEGSSTPSGATGSPGTPGSGTASSSPGSSTPSGATGSPGTSTEPSEGSAPGTSTEPSEGSAPGSEPATSGSETPGSPAGSPTSTEEGSPAGSPTSTEEGTSTEPSEGSAPGASASGAPSTGGTSESATPESGPGSPAGSPTSTEEGSPAGSPTSTEEGSTSSTAESPGPGSTSESPSGTAPGTSPSGESSTAPGTPGSGTASSSPGSSTPSGATGSPGSSPSASTGTGPGSEPATSGSETPGTSESATPESGPGSEPATSGSETPGSTSSTAESPGPGSTSSTAESPGPGTSPSGESSTAPGSEPATSGSETPGSEPATSGSETPGTSTEPSEGSAPGSTSSTAESPGPGTSTPESGSASPGSTSESPSGTAPGTSTEPSEGSAPGTSTEPSEGSAPGTSTEPSEGSAPGSSTPSGATGSPGSSPSASTGTGPGASPGTSSTGSPGSEPATSGSETPGTSESATPESGPGSPAGSPTSTEEGSSTPSGATGSPGSSPSASTGTGPGASPGTSSTGSPGTSESATPESGPGTSTEPSEGSAPGTSTEPSEGSAP

SEQ ID NO: 764 - protein, 899 aa, Artificial Sequence
  Description of Artificial Sequence: Synthetic polypeptide
HADGSFSDEMNTVLDSLATRDFINWLLQTKITDGGSPAGSPTSTEEGTSESATPESGPGTSTEPSEGSAPGSPAGSPTSTEEGTSTEPSEGSAPGTSTEPSEGSAPGTSESATPESGPGSEPATSGSETPGSEPATSGSETPGSPAGSPTSTEEGTSESATPESGPGTSTEPSEGSAPGTSTEPSEGSAPGSPAGSPTSTEEGTSTEPSEGSAPGTSTEPSEGSAPGTSESATPESGPGTSTEPSEGSAPGTSESATPESGPGSEPATSGSETPGTSTEPSEGSAPGTSTEPSEGSAPGTSESATPESGPGTSESATPESGPGSPAGSPTSTEEGTSESATPESGPGSEPATSGSETPGTSESATPESGPGTSTEPSEGSAPGTSTEPSEGSAPGTSTEPSEGSAPGTSTEPSEGSAPGTSTEPSEGSAPGTSTEPSEGSAPGSPAGSPTSTEEGTSTEPSEGSAPGTSESATPESGPGSEPATSGSETPGTSESATPESGPGSEPATSGSETPGTSESATPESGPGTSTEPSEGSAPGTSESATPESGPGSPAGSPTSTEEGSPAGSPTSTEEGSPAGSPTSTEEGTSESATPESGPGTSTEPSEGSAPGTSESATPESGPGSEPATSGSETPGTSESATPESGPGSEPATSGSETPGTSESATPESGPGTSTEPSEGSAPGSPAGSPTSTEEGTSESATPESGPGSEPATSGSETPGTSESATPESGPGSPAGSPTSTEEGSPAGSPTSTEEGTSTEPSEGSAPGTSESATPESGPGTSESATPESGPGTSESATPESGPGSEPATSGSETPGSEPATSGSETPGSPAGSPTSTEEGTSTEPSEGSAPGTSTEPSEGSAPGSEPATSGSETPGTSESATPESGPGTSTEPSEGSAPG

SEQ ID NO: 765 - protein, 900 aa, Artificial Sequence
  Description of Artificial Sequence: Synthetic polypeptide
HADGSFSDEMNTVLDNLATRDFINWLLHTKITDSLGGASPGTSSTGSPGSSPSASTGTGPGSSPSASTGTGPGTPGSGTASSSPGSSTPSGATGSPGSNPSASTGTGPGASPGTSSTGSPGTPGSGTASSSPGSSTPSGATGSPGTPGSGTASSSPGASPGTSSTGSPGASPGTSSTGSPGTPGSGTASSSPGSSTPSGATGSPGASPGTSSTGSPGTPGSGTASSSPGSSTPSGATGSPGSNPSASTGTGPGSSPSASTGTGPGSSTPSGATGSPGSSTPSGATGSPGASPGTSSTGSPGASPGTSSTGSPGASPGTSSTGSPGTPGSGTASSSPGASPGTSSTGSPGASPGTSSTGSPGASPGTSSTGSPGSSPSASTGTGPGTPGSGTASSSPGASPGTSSTGSPGASPGTSSTGSPGASPGTSSTGSPGSSTPSGATGSPGSSTPSGATGSPGASPGTSSTGSPGTPGSGTASSSPGSSTPSGATGSPGSSTPSGATGSPGSSTPSGATGSPGSSPSASTGTGPGASPGTSSTGSPGASPGTSSTGSPGTPGSGTASSSPGASPGTSSTGSPGASPGTSSTGSPGASPGTSSTGSPGASPGTSSTGSPGTPGSGTASSSPGSSTPSGATGSPGTPGSGTASSSPGSSTPSGATGSPGTPGSGTASSSPGSSTPSGATGSPGSSTPSGATGSPGSSPSASTGTGPGSSPSASTGTGPGASPGTSSTGSPGTPGSGTASSSPGSSTPSGATGSPGSSPSASTGTGPGSSPSASTGTGPGASPGTSSTGSPGASPGTSSTGSPGSSTPSGATGSPGSSPSASTGTGPGASPGTSSTGSPGSSPSASTGTGPGTPGSGTASSSPGSSTPSGATGSPGSSTPSGATGSPGASPGTSSTGSP

SEQ ID NO: 766 - protein, 610 aa, Artificial Sequence
  Description of Artificial Sequence: Synthetic polypeptide
HADGSFSDEMNTILDNLATRDFINWLIQTKITDGGSPAGSPTSTEEGTSESATPESGPGTSTEPSEGSAPGSPAGSPTSTEEGTSTEPSEGSAPGTSTEPSEGSAPGTSESATPESGPGSEPATSGSETPGSEPATSGSETPGSPAGSPTSTEEGTSESATPESGPGTSTEPSEGSAPGTSTEPSEGSAPGSPAGSPTSTEEGTSTEPSEGSAPGTSTEPSEGSAPGTSESATPESGPGTSTEPSEGSAPGTSESATPESGPGSEPATSGSETPGTSTEPSEGSAPGTSTEPSEGSAPGTSESATPESGPGTSESATPESGPGSPAGSPTSTEEGTSESATPESGPGSEPATSGSETPGTSESATPESGPGTSTEPSEGSAPGTSTEPSEGSAPGTSTEPSEGSAPGTSTEPSEGSAPGTSTEPSEGSAPGTSTEPSEGSAPGSPAGSPTSTEEGTSTEPSEGSAPGTSESATPESGPGSEPATSGSETPGTSESATPESGPGSEPATSGSETPGTSESATPESGPGTSTEPSEGSAPGTSESATPESGPGSPAGSPTSTEEGSPAGSPTSTEEGSPAGSPTSTEEGTSESATPESGPGTSTEPSEGSAP

SEQ ID NO: 767 - protein, 909 aa, Artificial Sequence
  Description of Artificial Sequence: Synthetic polypeptide
  MOD_RES (464)..(466): Any amino acid
  MOD_RES (477)..(480): Any amino acid
HKDGSFSDEMNTILDNLAARDFINWLIQTKITDGGSTSESPSGTAPGTSPSGESSTAPGSTSESPSGTAPGSTSESPSGTAPGTSTPESGSASPGTSTPESGSASPGSTSESPSGTAPGSTSESPSGTAPGTSPSGESSTAPGSTSESPSGTAPGTSPSGESSTAPGTSPSGESSTAPGSTSSTAESPGPGTSPSGESSTAPGTSPSGESSTAPGSTSSTAESPGPGTSTPESGSASPGTSTPESGSASPGSTSESPSGTAPGSTSESPSGTAPGTSTPESGSASPGSTSSTAESPGPGTSTPESGSASPGSTSESPSGTAPGTSPSGESSTAPGSTSSTAESPGPGTSPSGESSTAPGTSTPESGSASPGSTSSTAESPGPGSTSSTAESPGPGSTSSTAESPGPGSTSSTAESPGPGTSPSGESSTAPGSTSESPSGTAPGSTSESPSGTAPGTSTPESGPXXXGASASGAPSTXXXXSESPSGTAPGSTSESPSGTAPGSTSESPSGTAPGSTSESPSGTAPGSTSESPSGTAPGSTSESPSGTAPGTSTPESGSASPGTSPSGESSTAPGTSPSGESSTAPGSTSSTAESPGPGTSPSGESSTAPGTSTPESGSASPGSTSESPSGTAPGSTSESPSGTAPGTSPSGESSTAPGSTSESPSGTAPGTSTPESGSASPGTSTPESGSASPGSTSESPSGTAPGTSTPESGSASPGSTSSTAESPGPGSTSESPSGTAPGSTSESPSGTAPGTSPSGESSTAPGSTSSTAESPGPGTSPSGESSTAPGTSTPESGSASPGTSPSGESSTAPGTSPSGESSTAPGTSPSGESSTAPGSTSSTAESPGPGSTSSTAESPGPGTSPSGESSTAPGSSPSASTGTGPGSSTPSGATGSPGSSTPSGATGSP

SEQ ID NO: 768 - protein, 899 aa, Artificial Sequence
  Description of Artificial Sequence: Synthetic polypeptide
HRDGSFSDEMNTILDNLAARDFINWLIQTKITDGGSPAGSPTSTEEGTSESATPESGPGTSTEPSEGSAPGSPAGSPTSTEEGTSTEPSEGSAPGTSTEPSEGSAPGTSESATPESGPGSEPATSGSETPGSEPATSGSETPGSPAGSPTSTEEGTSESATPESGPGTSTEPSEGSAPGTSTEPSEGSAPGSPAGSPTSTEEGTSTEPSEGSAPGTSTEPSEGSAPGTSESATPESGPGTSTEPSEGSAPGTSESATPESGPGSEPATSGSETPGTSTEPSEGSAPGTSTEPSEGSAPGTSESATPESGPGTSESATPESGPGSPAGSPTSTEEGTSESATPESGPGSEPATSGSETPGTSESATPESGPGTSTEPSEGSAPGTSTEPSEGSAPGTSTEPSEGSAPGTSTEPSEGSAPGTSTEPSEGSAPGTSTEPSEGSAPGSPAGSPTSTEEGTSTEPSEGSAPGTSESATPESGPGSEPATSGSETPGTSESATPESGPGSEPATSGSETPGTSESATPESGPGTSTEPSEGSAPGTSESATPESGPGSPAGSPTSTEEGSPAGSPTSTEEGSPAGSPTSTEEGTSESATPESGPGTSTEPSEGSAPGTSESATPESGPGSEPATSGSETPGTSESATPESGPGSEPATSGSETPGTSESATPESGPGTSTEPSEGSAPGSPAGSPTSTEEGTSESATPESGPGSEPATSGSETPGTSESATPESGPGSPAGSPTSTEEGSPAGSPTSTEEGTSTEPSEGSAPGTSESATPESGPGTSESATPESGPGTSESATPESGPGSEPATSGSETPGSEPATSGSETPGSPAGSPTSTEEGTSTEPSEGSAPGTSTEPSEGSAPGSEPATSGSETPGTSESATPESGPGTSTEPSEGSAPG

SEQ ID NO: 769 - protein, 1058 aa, Artificial Sequence
  Description of Artificial Sequence: Synthetic polypeptide
HGDGSFSDEMNTILDNLAARDFINWLIQTKITDGGSPAGSPTSTEEGTSTEPSEGSAPGSPAGSPTSTEEGTSESATPESGPGSEPATSGSETPGTSTEPSEGSAPGTSTEPSEGSAPGTSESATPESGPGTSTEPSEGSAPGTSTEPSEGSAPGSEPATSGSETPGSPAGSPTSTEEGTSESATPESGPGSPAGSPTSTEEGTSTEPSEGSAPGSPAGSPTSTEEGTSTEPSEGSAPGSPAGSPTSTEEGTSTEPSEGSAPGSPAGSPTSTEEGSPAGSPTSTEEGTSTEPSEGSAPGSEPATSGSETPGSPAGSPTSTEEGTSESATPESGPGSEPATSGSETPGSEPATSGSETPGTSESATPESGPGSPAGSPTSTEEGTSESATPESGPGSEPATSGSETPGSEPATSGSETPGTSESATPESGPGTSESATPESGPGTSTEPSEGSAPGTSTEPSEGSAPGTSESATPESGPGSPAGSPTSTEEGTSTEPSEGSAPGSEPATSGSETPGSPAGSPTSTEEGTSTEPSEGSAPGTSTEPSEGSAPGSPAGSPTSTEEGSPAGSPTSTEEGSPAGSPTSTEEGTSESATPESGPGSEPATSGSETPGTSESATPESGPGTSESATPESGPGTSTEPSEGSAPGTSESATPESGPGSPAGSPTSTEEGTSESATPESGPGTSESATPESGPGTSTEPSEGSAPGSEPATSGSETPGTSTEPSEGSAPGSPAGSPTSTEEGTSESATPESGPGTSTEPSEGSAPGTSTEPSEGSAPGSEPATSGSETPGSEPATSGSETPGTSESATPESGPGSEPATSGSETPGSPAGSPTSTEEGTSESATPESGPGSEPATSGSETPGTSTEPSEGSAPGTSESATPESGPGTSESATPESGPGTSTEPSEGSAPGSEPATSGSETPGTSTEPSEGSAPGSPAGSPTSTEEGSPAGSPTSTEEGTSESATPESGPGSEPATSGSETPGSPAGSPTSTEEGSPAGSPTSTEEGTSESATPESGPGSEPATSGSETPGTSTEPSEGSAPGTSTEPSEGSAPGSEP

SEQ ID NO: 770 - protein, 1058 aa, Artificial Sequence
  Description of Artificial Sequence: Synthetic polypeptide
HGDGSFSDEMNTILDNLAARDFINWLIQTKITDGGSPAGSPTSTEEGTSTEPSEGSAPGTSESATPESGPGTSESATPESGPGSEPATSGSETPGTSTEPSEGSAPGTSESATPESGPGSPAGSPTSTEEGTSTEPSEGSAPGTSESATPESGPGSPAGSPTSTEEGTSTEPSEGSAPGTSESATPESGPGTSTEPSEGSAPGSEPATSGSETPGSEPATSGSETPGSEPATSGSETPGTSESATPESGPGSPAGSPTSTEEGTSESATPESGPGSEPATSGSETPGTSESATPESGPGTSESATPESGPGSPAGSPTSTEEGTSTEPSEGSAPGTSESATPESGPGTSTEPSEGSAPGTSTEPSEGSAPGTSTEPSEGSAPGSEPATSGSETPGTSTEPSEGSAPGTSESATPESGPGTSESATPESGPGTSTEPSEGSAPGTSESATPESGPGTSESATPESGPGSEPATSGSETPGTSTEPSEGSAPGTSESATPESGPGSPAGSPTSTEEGSPAGSPTSTEEGTSTEPSEGSAPGSEPATSGSETPGSEPATSGSETPGTSTEPSEGSAPGSEPATSGSETPGSPAGSPTSTEEGTSESATPESGPGSEPATSGSETPGSEPATSGSETPGTSESATPESGPGTSESATPESGPGTSTEPSEGSAPGSPAGSPTSTEEGTSESATPESGPGTSTEPSEGSAPGSEPATSGSETPGSPAGSPTSTEEGTSTEPSEGSAPGTSTEPSEGSAPGSEPATSGSETPGTSESATPESGPGTSTEPSEGSAPGSPAGSPTSTEEGTSESATPESGPGTSESATPESGPGTSTEPSEGSAPGSEPATSGSETPGSEPATSGSETPGTSTEPSEGSAPGTSESATPESGPGSPAGSPTSTEEGTSTEPSEGSAPGTSTEPSEGSAPGSPAGSPTSTEEGSPAGSPTSTEEGTSTEPSEGSAPGSEPATSGSETPGSPAGSPTSTEEGTSESATPESGPGSEPATSGSETPGSEPATSGSETPGTSESATPESGPGTSESATPESGPGTSTEPSEGSAPGTST

SEQ ID NO: 771 - protein, 646 aa, Artificial Sequence
  Description of Artificial Sequence: Synthetic polypeptide
HGDGSFSDEMNTILDNLAARDFINWLIQTKITDGGSETPGTSTEPSEGSAPGTSTEPSEGSAPGTSESATPESGPGTSESATPESGPGSPAGSPTSTEEGTSESATPESGPGSEPATSGSETPGTSESATPESGPGTSTEPSEGSAPGTSTEPSEGSAPGTSTEPSEGSAPGTSTEPSEGSAPGTSTEPSEGSAPGTSTEPSEGSAPGSPAGSPTSTEEGTSTEPSEGSAPGTSESATPESGPGSEPATSGSETPGTSESATPESGPGSEPATSGSETPGTSESATPESGPGTSTEPSEGSAPGTSESATPESGPGSPAGSPTSTEEGSPAGSPTSTEEGSPAGSPTSTEEGTSESATPESGPGTSTEPSEGSAPGTSESATPESGPGSEPATSGSETPGTSESATPESGPGSEPATSGSETPGTSESATPESGPGTSTEPSEGSAPGSPAGSPTSTEEGTSESATPESGPGSEPATSGSETPGTSESATPESGPGSPAGSPTSTEEGSPAGSPTSTEEGTSTEPSEGSAPGTSESATPESGPGTSESATPESGPGTSESATPESGPGSEPATSGSETPGSEPATSGSETPGSPAGSPTSTEEGTSTEPSEGSAPGTSTEPSEGSAPGSEPATSGSETPGTSESAT

SEQ ID NO: 772 - protein, 754 aa, Artificial Sequence
  Description of Artificial Sequence: Synthetic polypeptide
HGDGSFSDEMNTILDNLAARDFINWLIQTKITDGTSGSETPGSEPATSGSETPGSPAGSPTSTEEGTSESATPESGPGTSTEPSEGSAPGTSTEPSEGSAPGSPAGSPTSTEEGTSTEPSEGSAPGTSTEPSEGSAPGTSESATPESGPGTSTEPSEGSAPGTSESATPESGPGSEPATSGSETPGTSTEPSEGSAPGTSTEPSEGSAPGTSESATPESGPGTSESATPESGPGSPAGSPTSTEEGTSESATPESGPGSEPATSGSETPGTSESATPESGPGTSTEPSEGSAPGTSTEPSEGSAPGTSTEPSEGSAPGTSTEPSEGSAPGTSTEPSEGSAPGTSTEPSEGSAPGSPAGSPTSTEEGTSTEPSEGSAPGTSESATPESGPGSEPATSGSETPGTSESATPESGPGSEPATSGSETPGTSESATPESGPGTSTEPSEGSAPGTSESATPESGPGSPAGSPTSTEEGSPAGSPTSTEEGSPAGSPTSTEEGTSESATPESGPGTSTEPSEGSAPGTSESATPESGPGSEPATSGSETPGTSESATPESGPGSEPATSGSETPGTSESATPESGPGTSTEPSEGSAPGSPAGSPTSTEEGTSESATPESGPGSEPATSGSETPGTSESATPESGPGSPAGSPTSTEEGSPAGSPTSTEEGTSTEPSEGSAPGTSESATPESGPGTSESATPESGPGTSESATPESGPGSEPATSGSETPGSEPATSGSETPGSPAGSPTSTEEGTSTE

SEQ ID NO: 773 - protein, 646 aa, Artificial Sequence
  Description of Artificial Sequence: Synthetic polypeptide
HGDGSFSDEMNTILDNLAARDFINWLIQTKITDGSTGSPGTPGSGTASSSPGSSTPSGATGSPGASPGTSSTGSPGTPGSGTASSSPGSSTPSGATGSPGSSPSASTGTGPGSSPSASTGTGPGSSTPSGATGSPGSSTPSGATGSPGASPGTSSTGSPGASPGTSSTGSPGASPGTSSTGSPGTPGSGTASSSPGASPGTSSTGSPGASPGTSSTGSPGASPGTSSTGSPGSSPSASTGTGPGTPGSGTASSSPGASPGTSSTGSPGASPGTSSTGSPGASPGTSSTGSPGSSTPSGATGSPGSSTPSGATGSPGASPGTSSTGSPGTPGSGTASSSPGSSTPSGATGSPGSSTPSGATGSPGSSTPSGATGSPGSSPSASTGTGPGASPGTSSTGSPGASPGTSSTGSPGTPGSGTASSSPGASPGTSSTGSPGASPGTSSTGSPGASPGTSSTGSPGASPGTSSTGSPGTPGSGTASSSPGSSTPSGATGSPGTPGSGTASSSPGSSTPSGATGSPGTPGSGTASSSPGSSTPSGATGSPGSSTPSGATGSPGSSPSASTGTGPGSSPSASTGTGPGASPGTSSTGSPGTPGSGTASSSPGSSTPSGATGSPGSSPSASTGTGPGSSPSASTGTGPGASPGTS

SEQ ID NO: 774 - protein, 826 aa, Artificial Sequence
  Description of Artificial Sequence: Synthetic polypeptide
HGDGSFSDEMNTILDNLAARDFINWLIQTKITDGTSSTGSPGSSPSASTGTGPGSSPSASTGTGPGTPGSGTASSSPGSSTPSGATGSPGSSPSASTGTGPGASPGTSSTGSPGTPGSGTASSSPGSSTPSGATGSPGTPGSGTASSSPGASPGTSSTGSPGASPGTSSTGSPGTPGSGTASSSPGSSTPSGATGSPGASPGTSSTGSPGTPGSGTASSSPGSSTPSGATGSPGSSPSASTGTGPGSSPSASTGTGPGSSTPSGATGSPGSSTPSGATGSPGASPGTSSTGSPGASPGTSSTGSPGASPGTSSTGSPGTPGSGTASSSPGASPGTSSTGSPGASPGTSSTGSPGASPGTSSTGSPGSSPSASTGTGPGTPGSGTASSSPGASPGTSSTGSPGASPGTSSTGSPGASPGTSSTGSPGSSTPSGATGSPGSSTPSGATGSPGASPGTSSTGSPGTPGSGTASSSPGSSTPSGATGSPGSSTPSGATGSPGSSTPSGATGSPGSSPSASTGTGPGASPGTSSTGSPGASPGTSSTGSPGTPGSGTASSSPGASPGTSSTGSPGASPGTSSTGSPGASPGTSSTGSPGASPGTSSTGSPGTPGSGTASSSPGSSTPSGATGSPGTPGSGTASSSPGSSTPSGATGSPGTPGSGTASSSPGSSTPSGATGSPGSSTPSGATGSPGSSPSASTGTGPGSSPSASTGTGPGASPGTSSTGSPGTPGSGTASSSPGSSTPSGATGSPGSSPSASTGTGPGSSPSASTGTGPGASPGTSSTGSPGASPGTSSTGSPGSSTPSGATGSPGSSPSASTGTGPGASPG

SEQ ID NO: 775 - protein, 881 aa, Artificial Sequence
  Description of Artificial Sequence: Synthetic polypeptide
HADGSFSDEMNTILDNLAARDFINWLIQTKITDGLTPRSLLVGGGGSSESGSSEGGPGSSESGSSEGGPGESPGGSSGSESGSGGEPSESGSSGESPGGSSGSESGESPGGSSGSESGSSESGSSEGGPGSSESGSSEGGPGSSESGSSEGGPGESPGGSSGSESGESPGGSSGSESGESPGGSSGSESGSSESGSSEGGPGSSESGSSEGGPGSSESGSSEGGPGSSESGSSEGGPGSSESGSSEGGPGSSESGSSEGGPGSGGEPSESGSSGESPGGSSGSESGESPGGSSGSESGSGGEPSESGSSGSEGSSGPGESSGSSESGSSEGGPGSGGEPSESGSSGSEGSSGPGESSGSSESGSSEGGPGSGGEPSESGSSGESPGGSSGSESGSGGEPSESGSSGSGGEPSESGSSGSSESGSSEGGPGSGGEPSESGSSGSGGEPSESGSSGSEGSSGPGESSGESPGGSSGSESGSEGSSGPGESSGSEGSSGPGESSGSGGEPSESGSSGSSESGSSEGGPGSSESGSSEGGPGESPGGSSGSESGSGGEPSESGSSGSEGSSGPGESSGESPGGSSGSESGSEGSSGPGSSESGSSEGGPGSGGEPSESGSSGSEGSSGPGESSGSEGSSGPGESSGSEGSSGPGESSGSGGEPSESGSSGSGGEPSESGSSGESPGGSSGSESGESPGGSSGSESGSGGEPSESGSSGSEGSSGPGESSGESPGGSSGSESGSSESGSSEGGPGSSESGSSEGGPGSSESGSSEGGPGSGGEPSESGSSGSSESGSSEGGPGESPGGSSGSESGSGGEPSESGSSGSSESGSSEGGPGESPGGSSGSESGSGGEPSESGSSGESPGGSSGSESGSGGEPSESGSS

SEQ ID NO: 776 - protein, 910 aa, Artificial Sequence
  Description of Artificial Sequence: Synthetic polypeptide
HADGSFSDEMNTILDNLAARDFINWLIQTKITDGGGKLTRVVGGGGSPAGSPTSTEEGTSESATPESGPGTSTEPSEGSAPGSPAGSPTSTEEGTSTEPSEGSAPGTSTEPSEGSAPGTSESATPESGPGSEPATSGSETPGSEPATSGSETPGSPAGSPTSTEEGTSESATPESGPGTSTEPSEGSAPGTSTEPSEGSAPGSPAGSPTSTEEGTSTEPSEGSAPGTSTEPSEGSAPGTSESATPESGPGTSTEPSEGSAPGTSESATPESGPGSEPATSGSETPGTSTEPSEGSAPGTSTEPSEGSAPGTSESATPESGPGTSESATPESGPGSPAGSPTSTEEGTSESATPESGPGSEPATSGSETPGTSESATPESGPGTSTEPSEGSAPGTSTEPSEGSAPGTSTEPSEGSAPGTSTEPSEGSAPGTSTEPSEGSAPGTSTEPSEGSAPGSPAGSPTSTEEGTSTEPSEGSAPGTSESATPESGPGSEPATSGSETPGTSESATPESGPGSEPATSGSETPGTSESATPESGPGTSTEPSEGSAPGTSESATPESGPGSPAGSPTSTEEGSPAGSPTSTEEGSPAGSPTSTEEGTSESATPESGPGTSTEPSEGSAPGTSESATPESGPGSEPATSGSETPGTSESATPESGPGSEPATSGSETPGTSESATPESGPGTSTEPSEGSAPGSPAGSPTSTEEGTSESATPESGPGSEPATSGSETPGTSESATPESGPGSPAGSPTSTEEGSPAGSPTSTEEGTSTEPSEGSAPGTSESATPESGPGTSESATPESGPGTSESATPESGPGSEPATSGSETPGSEPATSGSETPGSPAGSPTSTEEGTSTEPSEGSAPGTSTEPSEGSAPGSEPATSGSETPGTSESATPESGPGTSTEPSEGSAPG

SEQ ID NO: 777 - protein, 920 aa, Artificial Sequence
  Description of Artificial Sequence: Synthetic polypeptide
  MOD_RES (475)..(477): Any amino acid
  MOD_RES (488)..(491): Any amino acid
HADGSFSDEMNTILDNLAARDFINWLIQTKITDGGGLGPVSGVPGGSTSESPSGTAPGTSPSGESSTAPGSTSESPSGTAPGSTSESPSGTAPGTSTPESGSASPGTSTPESGSASPGSTSESPSGTAPGSTSESPSGTAPGTSPSGESSTAPGSTSESPSGTAPGTSPSGESSTAPGTSPSGESSTAPGSTSSTAESPGPGTSPSGESSTAPGTSPSGESSTAPGSTSSTAESPGPGTSTPESGSASPGTSTPESGSASPGSTSESPSGTAPGSTSESPSGTAPGTSTPESGSASPGSTSSTAESPGPGTSTPESGSASPGSTSESPSGTAPGTSPSGESSTAPGSTSSTAESPGPGTSPSGESSTAPGTSTPESGSASPGSTSSTAESPGPGSTSSTAESPGPGSTSSTAESPGPGSTSSTAESPGPGTSPSGESSTAPGSTSESPSGTAPGSTSESPSGTAPGTSTPESGPXXXGASASGAPSTXXXXSESPSGTAPGSTSESPSGTAPGSTSESPSGTAPGSTSESPSGTAPGSTSESPSGTAPGSTSESPSGTAPGTSTPESGSASPGTSPSGESSTAPGTSPSGESSTAPGSTSSTAESPGPGTSPSGESSTAPGTSTPESGSASPGSTSESPSGTAPGSTSESPSGTAPGTSPSGESSTAPGSTSESPSGTAPGTSTPESGSASPGTSTPESGSASPGSTSESPSGTAPGTSTPESGSASPGSTSSTAESPGPGSTSESPSGTAPGSTSESPSGTAPGTSPSGESSTAPGSTSSTAESPGPGTSPSGESSTAPGTSTPESGSASPGTSPSGESSTAPGTSPSGESSTAPGTSPSGESSTAPGSTSSTAESPGPGSTSSTAESPGPGTSPSGESSTAPGSSPSASTGTGPGSSTPSGATGSPGSSTPSGATGSP

SEQ ID NO: 778 - protein, 909 aa, Artificial Sequence
  Description of Artificial Sequence: Synthetic polypeptide
HADGSFSDEMNTILDNLAARDFINWLIQTKITDGAPLGLRLRGGGGASPGTSSTGSPGSSPSASTGTGPGSSPSASTGTGPGTPGSGTASSSPGSSTPSGATGSPGSNPSASTGTGPGASPGTSSTGSPGTPGSGTASSSPGSSTPSGATGSPGTPGSGTASSSPGASPGTSSTGSPGASPGTSSTGSPGTPGSGTASSSPGSSTPSGATGSPGASPGTSSTGSPGTPGSGTASSSPGSSTPSGATGSPGSNPSASTGTGPGSSPSASTGTGPGSSTPSGATGSPGSSTPSGATGSPGASPGTSSTGSPGASPGTSSTGSPGASPGTSSTGSPGTPGSGTASSSPGASPGTSSTGSPGASPGTSSTGSPGASPGTSSTGSPGSSPSASTGTGPGTPGSGTASSSPGASPGTSSTGSPGASPGTSSTGSPGASPGTSSTGSPGSSTPSGATGSPGSSTPSGATGSPGASPGTSSTGSPGTPGSGTASSSPGSSTPSGATGSPGSSTPSGATGSPGSSTPSGATGSPGSSPSASTGTGPGASPGTSSTGSPGASPGTSSTGSPGTPGSGTASSSPGASPGTSSTGSPGASPGTSSTGSPGASPGTSSTGSPGASPGTSSTGSPGTPGSGTASSSPGSSTPSGATGSPGTPGSGTASSSPGSSTPSGATGSPGTPGSGTASSSPGSSTPSGATGSPGSSTPSGATGSPGSSPSASTGTGPGSSPSASTGTGPGASPGTSSTGSPGTPGSGTASSSPGSSTPSGATGSPGSSPSASTGTGPGSSPSASTGTGPGASPGTSSTGSPGASPGTSSTGSPGSSTPSGATGSPGSSPSASTGTGPGASPGTSSTGSPGSSPSASTGTGPGTPGSGTASSSPGSSTPSGATGSPGSSTPSGATGSPGASPGTSSTGSP

SEQ ID NO: 779 - protein, 881 aa, Artificial Sequence
  Description of Artificial Sequence: Synthetic polypeptide
HGDGSFSDEMNTILDNLAARDFINWLIQTKITDGLTPRSLLVGGGGSSESGSSEGGPGSSESGSSEGGPGESPGGSSGSESGSGGEPSESGSSGESPGGSSGSESGESPGGSSGSESGSSESGSSEGGPGSSESGSSEGGPGSSESGSSEGGPGESPGGSSGSESGESPGGSSGSESGESPGGSSGSESGSSESGSSEGGPGSSESGSSEGGPGSSESGSSEGGPGSSESGSSEGGPGSSESGSSEGGPGSSESGSSEGGPGSGGEPSESGSSGESPGGSSGSESGESPGGSSGSESGSGGEPSESGSSGSEGSSGPGESSGSSESGSSEGGPGSGGEPSESGSSGSEGSSGPGESSGSSESGSSEGGPGSGGEPSESGSSGESPGGSSGSESGSGGEPSESGSSGSGGEPSESGSSGSSESGSSEGGPGSGGEPSESGSSGSGGEPSESGSSGSEGSSGPGESSGESPGGSSGSESGSEGSSGPGESSGSEGSSGPGESSGSGGEPSESGSSGSSESGSSEGGPGSSESGSSEGGPGESPGGSSGSESGSGGEPSESGSSGSEGSSGPGESSGESPGGSSGSESGSEGSSGPGSSESGSSEGGPGSGGEPSESGSSGSEGSSGPGESSGSEGSSGPGESSGSEGSSGPGESSGSGGEPSESGSSGSGGEPSESGSSGESPGGSSGSESGESPGGSSGSESGSGGEPSESGSSGSEGSSGPGESSGESPGGSSGSESGSSESGSSEGGPGSSESGSSEGGPGSSESGSSEGGPGSGGEPSESGSSGSSESGSSEGGPGESPGGSSGSESGSGGEPSESGSSGSSESGSSEGGPGESPGGSSGSESGSGGEPSESGSSGESPGGSSGSESGSGGEPSESGSS

SEQ ID NO: 780 - protein, 910 aa, Artificial Sequence
  Description of Artificial Sequence: Synthetic polypeptide
HGDGSFSDEMNTILDNLAARDFINWLIQTKITDGGGKLTRVVGGGGSPAGSPTSTEEGTSESATPESGPGTSTEPSEGSAPGSPAGSPTSTEEGTSTEPSEGSAPGTSTEPSEGSAPGTSESATPESGPGSEPATSGSETPGSEPATSGSETPGSPAGSPTSTEEGTSESATPESGPGTSTEPSEGSAPGTSTEPSEGSAPGSPAGSPTSTEEGTSTEPSEGSAPGTSTEPSEGSAPGTSESATPESGPGTSTEPSEGSAPGTSESATPESGPGSEPATSGSETPGTSTEPSEGSAPGTSTEPSEGSAPGTSESATPESGPGTSESATPESGPGSPAGSPTSTEEGTSESATPESGPGSEPATSGSETPGTSESATPESGPGTSTEPSEGSAPGTSTEPSEGSAPGTSTEPSEGSAPGTSTEPSEGSAPGTSTEPSEGSAPGTSTEPSEGSAPGSPAGSPTSTEEGTSTEPSEGSAPGTSESATPESGPGSEPATSGSETPGTSESATPESGPGSEPATSGSETPGTSESATPESGPGTSTEPSEGSAPGTSESATPESGPGSPAGSPTSTEEGSPAGSPTSTEEGSPAGSPTSTEEGTSESATPESGPGTSTEPSEGSAPGTSESATPESGPGSEPATSGSETPGTSESATPESGPGSEPATSGSETPGTSESATPESGPGTSTEPSEGSAPGSPAGSPTSTEEGTSESATPESGPGSEPATSGSETPGTSESATPESGPGSPAGSPTSTEEGSPAGSPTSTEEGTSTEPSEGSAPGTSESATPESGPGTSESATPESGPGTSESATPESGPGSEPATSGSETPGSEPATSGSETPGSPAGSPTSTEEGTSTEPSEGSAPGTSTEPSEGSAPGSEPATSGSETPGTSESATPESGPGTSTEPSEGSAPG

SEQ ID NO: 781 - protein, 920 aa, Artificial Sequence
  Description of Artificial Sequence: Synthetic polypeptide
  MOD_RES (475)..(477): Any amino acid
  MOD_RES (488)..(491): Any amino acid
HGDGSFSDEMNTILDNLAARDFINWLIQTKITDGGGLGPVSGVPGGSTSESPSGTAPGTSPSGESSTAPGSTSESPSGTAPGSTSESPSGTAPGTSTPESGSASPGTSTPESGSASPGSTSESPSGTAPGSTSESPSGTAPGTSPSGESSTAPGSTSESPSGTAPGTSPSGESSTAPGTSPSGESSTAPGSTSSTAESPGPGTSPSGESSTAPGTSPSGESSTAPGSTSSTAESPGPGTSTPESGSASPGTSTPESGSASPGSTSESPSGTAPGSTSESPSGTAPGTSTPESGSASPGSTSSTAESPGPGTSTPESGSASPGSTSESPSGTAPGTSPSGESSTAPGSTSSTAESPGPGTSPSGESSTAPGTSTPESGSASPGSTSSTAESPGPGSTSSTAESPGPGSTSSTAESPGPGSTSSTAESPGPGTSPSGESSTAPGSTSESPSGTAPGSTSESPSGTAPGTSTPESGPXXXGASASGAPSTXXXXSESPSGTAPGSTSESPSGTAPGSTSESPSGTAPGSTSESPSGTAPGSTSESPSGTAPGSTSESPSGTAPGTSTPESGSASPGTSPSGESSTAPGTSPSGESSTAPGSTSSTAESPGPGTSPSGESSTAPGTSTPESGSASPGSTSESPSGTAPGSTSESPSGTAPGTSPSGESSTAPGSTSESPSGTAPGTSTPESGSASPGTSTPESGSASPGSTSESPSGTAPGTSTPESGSASPGSTSSTAESPGPGSTSESPSGTAPGSTSESPSGTAPGTSPSGESSTAPGSTSSTAESPGPGTSPSGESSTAPGTSTPESGSASPGTSPSGESSTAPGTSPSGESSTAPGTSPSGESSTAPGSTSSTAESPGPGSTSSTAESPGPGTSPSGESSTAPGSSPSASTGTGPGSSTPSGATGSPGSSTPSGATGSP

SEQ ID NO: 782 - protein, 909 aa, Artificial Sequence
  Description of Artificial Sequence: Synthetic polypeptide
HGDGSFSDEMNTILDNLAARDFINWLIQTKITDGAPLGLRLRGGGGASPGTSSTGSPGSSPSASTGTGPGSSPSASTGTGPGTPGSGTASSSPGSSTPSGATGSPGSNPSASTGTGPGASPGTSSTGSPGTPGSGTASSSPGSSTPSGATGSPGTPGSGTASSSPGASPGTSSTGSPGASPGTSSTGSPGTPGSGTASSSPGSSTPSGATGSPGASPGTSSTGSPGTPGSGTASSSPGSSTPSGATGSPGSNPSASTGTGPGSSPSASTGTGPGSSTPSGATGSPGSSTPSGATGSPGASPGTSSTGSPGASPGTSSTGSPGASPGTSSTGSPGTPGSGTASSSPGASPGTSSTGSPGASPGTSSTGSPGASPGTSSTGSPGSSPSASTGTGPGTPGSGTASSSPGASPGTSSTGSPGASPGTSSTGSPGASPGTSSTGSPGSSTPSGATGSPGSSTPSGATGSPGASPGTSSTGSPGTPGSGTASSSPGSSTPSGATGSPGSSTPSGATGSPGSSTPSGATGSPGSSPSASTGTGPGASPGTSSTGSPGASPGTSSTGSPGTPGSGTASSSPGASPGTSSTGSPGASPGTSSTGSPGASPGTSSTGSPGASPGTSSTGSPGTPGSGTASSSPGSSTPSGATGSPGTPGSGTASSSPGSSTPSGATGSPGTPGSGTASSSPGSSTPSGATGSPGSSTPSGATGSPGSSPSASTGTGPGSSPSASTGTGPGASPGTSSTGSPGTPGSGTASSSPGSSTPSGATGSPGSSPSASTGTGPGSSPSASTGTGPGASPGTSSTGSPGASPGTSSTGSPGSSTPSGATGSPGSSPSASTGTGPGASPGTSSTGSPGSSPSASTGTGPGTPGSGTASSSPGSSTPSGATGSPGSSTPSGATGSPGASPGTSSTGSP

SEQ ID NO: 783 - protein, 958 aa, Artificial Sequence
  Description of Artificial Sequence: Synthetic polypeptide
MAEPAGSPTSTEEGTPGSGTASSSPGSSTPSGATGSPGASPGTSSTGSPGSPAGSPTSTEEGTSESATPESGPGTSTEPSEGSAPGSPAGSPTSTEEGTSTEPSEGSAPGTSTEPSEGSAPGTSESATPESGPGSEPATSGSETPGSEPATSGSETPGSPAGSPTSTEEGTSESATPESGPGTSTEPSEGSAPGTSTEPSEGSAPGSPAGSPTSTEEGTSTEPSEGSAPGTSTEPSEGSAPGTSESATPESGPGTSTEPSEGSAPGTSESATPESGPGSEPATSGSETPGTSTEPSEGSAPGTSTEPSEGSAPGTSESATPESGPGTSESATPESGPGSPAGSPTSTEEGTSESATPESGPGSEPATSGSETPGTSESATPESGPGTSTEPSEGSAPGTSTEPSEGSAPGTSTEPSEGSAPGTSTEPSEGSAPGTSTEPSEGSAPGTSTEPSEGSAPGSPAGSPTSTEEGTSTEPSEGSAPGTSESATPESGPGSEPATSGSETPGTSESATPESGPGSEPATSGSETPGTSESATPESGPGTSTEPSEGSAPGTSESATPESGPGSPAGSPTSTEEGSPAGSPTSTEEGSPAGSPTSTEEGTSESATPESGPGTSTEPSEGSAPGTSESATPESGPGSEPATSGSETPGTSESATPESGPGSEPATSGSETPGTSESATPESGPGTSTEPSEGSAPGSPAGSPTSTEEGTSESATPESGPGSEPATSGSETPGTSESATPESGPGSPAGSPTSTEEGSPAGSPTSTEEGTSTEPSEGSAPGTSESATPESGPGTSESATPESGPGTSESATPESGPGSEPATSGSETPGSEPATSGSETPGSPAGSPTSTEEGTSTEPSEGSAPGTSTEPSEGSAPGSEPATSGSETPGTSESATPESGPGTSTEPSEGSAPGLTPRSLLVGGGHADGSFSDEMNTILDNLAARDFINWLIQTKITD

SEQ ID NO: 784 - protein, 958 aa, Artificial Sequence
  Description of Artificial Sequence: Synthetic polypeptide
MAEPAGSPTSTEEGTPGSGTASSSPGSSTPSGATGSPGASPGTSSTGSPGSPAGSPTSTEEGTSESATPESGPGTSTEPSEGSAPGSPAGSPTSTEEGTSTEPSEGSAPGTSTEPSEGSAPGTSESATPESGPGSEPATSGSETPGSEPATSGSETPGSPAGSPTSTEEGTSESATPESGPGTSTEPSEGSAPGTSTEPSEGSAPGSPAGSPTSTEEGTSTEPSEGSAPGTSTEPSEGSAPGTSESATPESGPGTSTEPSEGSAPGTSESATPESGPGSEPATSGSETPGTSTEPSEGSAPGTSTEPSEGSAPGTSESATPESGPGTSESATPESGPGSPAGSPTSTEEGTSESATPESGPGSEPATSGSETPGTSESATPESGPGTSTEPSEGSAPGTSTEPSEGSAPGTSTEPSEGSAPGTSTEPSEGSAPGTSTEPSEGSAPGTSTEPSEGSAPGSPAGSPTSTEEGTSTEPSEGSAPGTSESATPESGPGSEPATSGSETPGTSESATPESGPGSEPATSGSETPGTSESATPESGPGTSTEPSEGSAPGTSESATPESGPGSPAGSPTSTEEGSPAGSPTSTEEGSPAGSPTSTEEGTSESATPESGPGTSTEPSEGSAPGTSESATPESGPGSEPATSGSETPGTSESATPESGPGSEPATSGSETPGTSESATPESGPGTSTEPSEGSAPGSPAGSPTSTEEGTSESATPESGPGSEPATSGSETPGTSESATPESGPGSPAGSPTSTEEGSPAGSPTSTEEGTSTEPSEGSAPGTSESATPESGPGTSESATPESGPGTSESATPESGPGSEPATSGSETPGSEPATSGSETPGSPAGSPTSTEEGTSTEPSEGSAPGTSTEPSEGSAPGSEPATSGSETPGTSESATPESGPGTSTEPSEGSAPGGGKLTRVVGGGHGDGSFSDEMNTILDNLAARDFINWLIQTKITD

SEQ ID NO: 785 - protein, 958 aa, Artificial Sequence
  Description of Artificial Sequence: Synthetic polypeptide
MAEPAGSPTSTEEGTPGSGTASSSPGSSTPSGATGSPGASPGTSSTGSPGSPAGSPTSTEEGTSESATPESGPGTSTEPSEGSAPGSPAGSPTSTEEGTSTEPSEGSAPGTSTEPSEGSAPGTSESATPESGPGSEPATSGSETPGSEPATSGSETPGSPAGSPTSTEEGTSESATPESGPGTSTEPSEGSAPGTSTEPSEGSAPGSPAGSPTSTEEGTSTEPSEGSAPGTSTEPSEGSAPGTSESATPESGPGTSTEPSEGSAPGTSESATPESGPGSEPATSGSETPGTSTEPSEGSAPGTSTEPSEGSAPGTSESATPESGPGTSESATPESGPGSPAGSPTSTEEGTSESATPESGPGSEPATSGSETPGTSESATPESGPGTSTEPSEGSAPGTSTEPSEGSAPGTSTEPSEGSAPGTSTEPSEGSAPGTSTEPSEGSAPGTSTEPSEGSAPGSPAGSPTSTEEGTSTEPSEGSAPGTSESATPESGPGSEPATSGSETPGTSESATPESGPGSEPATSGSETPGTSESATPESGPGTSTEPSEGSAPGTSESATPESGPGSPAGSPTSTEEGSPAGSPTSTEEGSPAGSPTSTEEGTSESATPESGPGTSTEPSEGSAPGTSESATPESGPGSEPATSGSETPGTSESATPESGPGSEPATSGSETPGTSESATPESGPGTSTEPSEGSAPGSPAGSPTSTEEGTSESATPESGPGSEPATSGSETPGTSESATPESGPGSPAGSPTSTEEGSPAGSPTSTEEGTSTEPSEGSAPGTSESATPESGPGTSESATPESGPGTSESATPESGPGSEPATSGSETPGSEPATSGSETPGSPAGSPTSTEEGTSTEPSEGSAPGTSTEPSEGSAPGSEPATSGSETPGTSESATPESGPGTSTEPSEGSAPGGGLGPVSGVPGHGDGSFSDEMNTILDNLAARDFINWLIQTKITD

SEQ ID NO: 786 - protein, 910 aa, Artificial Sequence
  Description of Artificial Sequence: Synthetic polypeptide
HGDGSFSDEMNTILDNLAARDFINWLIQTKITDGAPLGLRLRGGGGSPAGSPTSTEEGTSESATPESGPGTSTEPSEGSAPGSPAGSPTSTEEGTSTEPSEGSAPGTSTEPSEGSAPGTSESATPESGPGSEPATSGSETPGSEPATSGSETPGSPAGSPTSTEEGTSESATPESGPGTSTEPSEGSAPGTSTEPSEGSAPGSPAGSPTSTEEGTSTEPSEGSAPGTSTEPSEGSAPGTSESATPESGPGTSTEPSEGSAPGTSESATPESGPGSEPATSGSETPGTSTEPSEGSAPGTSTEPSEGSAPGTSESATPESGPGTSESATPESGPGSPAGSPTSTEEGTSESATPESGPGSEPATSGSETPGTSESATPESGPGTSTEPSEGSAPGTSTEPSEGSAPGTSTEPSEGSAPGTSTEPSEGSAPGTSTEPSEGSAPGTSTEPSEGSAPGSPAGSPTSTEEGTSTEPSEGSAPGTSESATPESGPGSEPATSGSETPGTSESATPESGPGSEPATSGSETPGTSESATPESGPGTSTEPSEGSAPGTSESATPESGPGSPAGSPTSTEEGSPAGSPTSTEEGSPAGSPTSTEEGTSESATPESGPGTSTEPSEGSAPGTSESATPESGPGSEPATSGSETPGTSESATPESGPGSEPATSGSETPGTSESATPESGPGTSTEPSEGSAPGSPAGSPTSTEEGTSESATPESGPGSEPATSGSETPGTSESATPESGPGSPAGSPTSTEEGSPAGSPTSTEEGTSTEPSEGSAPGTSESATPESGPGTSESATPESGPGTSESATPESGPGSEPATSGSETPGSEPATSGSETPGSPAGSPTSTEEGTSTEPSEGSAPGTSTEPSEGSAPGSEPATSGSETPGTSESATPESGPGTSTEPSEGSAPG

SEQ ID NO: 787 - protein, 11 aa, Artificial Sequence
  Description of Artificial Sequence: Synthetic peptide
ASTGETGETGE

SEQ ID NO: 788 - protein, 864 aa, Artificial Sequence; identical to SEQ ID NO: 98
  Description of Artificial Sequence: Synthetic polypeptide

SEQ ID NO: 789 - protein, 576 aa, Artificial Sequence; identical to SEQ ID NO: 93
  Description of Artificial Sequence: Synthetic polypeptide

SEQ ID NO: 790 - protein, 881 aa, Artificial Sequence
  Description of Artificial Sequence: Synthetic polypeptide
GASPGTSSTGSPGSSPSASTGTGPGSSPSASTGTGPGTPGSGTASSSPGSSTPSGATGSPGSSPSASTGTGPGASPGTSSTGSPGTPGSGTASSSPGSSTPSGATGSPGTPGSGTASSSPGASPGTSSTGSPGASPGTSSTGSPGTPGSGTASSSPGSSTPSGATGSPGASPGTSSTGSPGTPGSGTASSSPGSSTPSGATGSPGSSPSASTGTGPGSSPSASTGTGPGSSTPSGATGSPGSSTPSGATGSPGASPGTSSTGSPGASPGTSSTGSPGASPGTSSTGSPGTPGSGTASSSPGASPGTSSTGSPGASPGTSSTGSPGASPGTSSTGSPGSSPSASTGTGPGTPGSGTASSSPGASPGTSSTGSPGASPGTSSTGSPGASPGTSSTGSPGSSTPSGATGSPGSSTPSGATGSPGASPGTSSTGSPGTPGSGTASSSPGSSTPSGATGSPGSSTPSGATGSPGSSTPSGATGSPGSSPSASTGTGPGASPGTSSTGSPGASPGTSSTGSPGTPGSGTASSSPGASPGTSSTGSPGASPGTSSTGSPGASPGTSSTGSPGASPGTSSTGSPGTPGSGTASSSPGSSTPSGATGSPGTPGSGTASSSPGSSTPSGATGSPGTPGSGTASSSPGSSTPSGATGSPGSSTPSGATGSPGSSPSATASSSPGSSTPSGATGSSTGTGPGSSPSASTGTGPGASPGTSSTGSPGTPGSGTASSSPGSSTPSGATGSPGSSPSASTGTGPGSSPSASTGTGPGASPGTSSTGSPGASPGTSSTGSPGSSTPSGATGSPGSSPSASTGTGPGASPGTSSTGSPGSSPSASTGTGPGTPGSGTASSSPGSSTPSGATGSPGSSTPSGATGSPGASPGTSSTGSP

SEQ ID NO: 791 - protein, 316 aa, Artificial Sequence
  Description of Artificial Sequence: Synthetic polypeptide
ASSSPGASPGTSSTGSPGASPGTSSTGSPGASPGTSSTGSPGASPGTSSTGSPGTPGSGTASSSPGSSTPSGATGSPGTPGSGTASSSPGSSTPSGATGSPGTPGSGTASSSPGSSTPSGATGSPGSSTPSGATGSPGSSPSASTGTGPGSSPSASTGTGPGASPGTSSTGSPGTPGSGTASSSPGSSTPSGATGSPGSSPSASTGTGPGSSPSASTGTGPGASPGTSSTGSPGASPGTSSTGSPGSSTPSGATGSPGSSPSASTGTGPGASPGTSSTGSPGSSPSASTGTGPGTPGSGTASSSPGSSTPSGATGS

SEQ ID NO: 792 - protein, 864 aa, Artificial Sequence; identical to SEQ ID NO: 98
  Description of Artificial Sequence: Synthetic polypeptide

SEQ ID NO: 793 - protein, 144 aa, Artificial Sequence; identical to SEQ ID NO: 77
  Description of Artificial Sequence: Synthetic polypeptide

SEQ ID NO: 794 - protein, 864 aa, Artificial Sequence; identical to SEQ ID NO: 96
  Description of Artificial Sequence: Synthetic polypeptide

SEQ ID NO: 795 - protein, 576 aa, Artificial Sequence; identical to SEQ ID NO: 91
  Description of Artificial Sequence: Synthetic polypeptide

SEQ ID NO: 796 - protein, 864 aa, Artificial Sequence; identical to SEQ ID NO: 96
  Description of Artificial Sequence: Synthetic polypeptide

SEQ ID NO: 797 - protein, 288 aa, Artificial Sequence; identical to SEQ ID NO: 84
  Description of Artificial Sequence: Synthetic polypeptide

SEQ ID NO: 798 - protein, 899 aa, Artificial Sequence; identical to SEQ ID NO: 682
  Description of Artificial Sequence: Synthetic polypeptide
